(19) United States
(12) Patent Application Publication
(10) Pub. No.: US 2025/0281536 A1
(43) Pub. Date: Sep. 11, 2025

(54) CD4-SPECIFIC ANTIBODY CONSTRUCTS AND COMPOSITIONS AND USES THEREOF

(71) Applicant: Sana Biotechnology, Inc., Seattle, WA (US)

(72) Inventors: Zachary P. FRYE, Cambridge, MA (US); Andre DEGROOT, Cambridge, MA (US); Christie CIARLO, Seattle, WA (US); Walter FLORES, Seattle, WA (US); Neal VAN HOEVEN, Seattle, WA (US); Kyle Marvin TRUDEAU, Boston, MA (US); Lauren Pepper MACKENZIE, Seattle, WA (US); Jagesh Vigaykumar SHAH, Lexington, MA (US); Patricia Ann CRUITE, Seattle, WA (US); Adam JOHNSON, Seattle, WA (US)

(21) Appl. No.: 18/852,220

(22) PCT Filed: Mar. 31, 2023
(86) PCT No.: PCT/US2023/065233

§ 371 Date: Sep. 27, 2024

Related U.S. Application Data
(60) Provisional application No. 63/326,269, filed on Mar. 31, 2022.
(60) Provisional application No. 63/341,681, filed on May 13, 2022.

(51) Int. Cl. A61K 35/17; A61K 40/11; A61K 40/31; A61K 40/42; A61P 35/02; C07K 14/005; C07K 14/725; C07K 16/28; C12N 15/86

(52) U.S. Cl. CPC A61K 35/17; A61K 40/11; A61K 40/31; A61K 40/421; A61P 35/02; C07K 14/005; C07K 14/7051; C07K 16/2812; C12N 15/86; A61K 2239/13; A61K 2239/48; C07K 2317/565; C07K 2317/569; C07K 2317/622; C07K 2317/92; C07K 2319/30; C12N 2740/15043; C12N 2740/15045; C12N 2760/18222

(57) ABSTRACT

Disclosed herein are antibodies and antigen binding fragments thereof that specifically bind human CD4. Also disclosed are fusion proteins comprising a glycoprotein G of the Paramyxoviridae family and CD4 antibodies for targeting and transducing cells expressing CD4. Viral vectors and other compositions containing the fusion proteins, as well as methods of using the fusion proteins, are also disclosed.

### FIELD

[0001] The present disclosure relates to antibodies or antigen binding fragments thereof that specifically bind human CD4. Also disclosed are fusion proteins comprising an envelope glycoprotein G, H, HN, and/or an F protein of the Paramyxoviridae family. Also disclosed are fusosomes comprising an envelope glycoprotein G, H, and/or an F protein of the Paramyxoviridae family. Fusosomes in one embodiment are gene therapy vectors pseudotyped with an envelope glycoprotein, including envelope glycoproteins G, H, HN and/or an F protein of the Paramyxoviridae family. Also disclosed are an envelope glycoprotein G, H, HN, and/or an F protein of the Paramyxoviridae family and a CD4 antibody, or an antigen binding fragment thereof, for targeting and transducing cells expressing CD4. Viral vectors and other compositions containing the fusion proteins, antibodies, or antigen binding fragments thereof, as well as methods of using the fusosomes, fusion proteins, antibodies, or antigen binding fragments thereof are also disclosed.

### SUMMARY

[0002] CD4 (cluster of differentiation 4) is a transmembrane glycoprotein that serves as a co-receptor for the T cell receptor (TCR). CD4 serves multiple functions in immune responses against both external and internal challenges. In T cells, the CD4 co-receptor functions primarily to bind to a major histocompatibility complex (MHC) molecule to facilitate T cell signaling and aid with cytotoxic T cell antigen interactions. While CD4 is predominantly expressed on the surface of helper T cells, it can also be found on natural killer cells, cortical thymocytes, and dendritic cells. The CD4 molecule is also used as a marker for cytotoxic T cell populations.

[0003] T lymphocytes are common targets in gene therapy, even more so since chimeric antigen receptor (CAR) T cells have reached the clinic. Current approaches for T cell engineering mainly rely on ex vivo gene transfer methods. Following their isolation from either healthy donors or patients, lymphocytes are activated and subsequently transduced by lentiviral vectors. The modified lymphocytes are then expanded and either used in functional in vivo assays or used for in vivo applications.

[0004] Ex vivo modification of T lymphocytes, however, has its disadvantages. The complexity of the overall procedure, cost of the manufacturing process, and prolonged ex vivo culture negatively impact the quality of the final product. Methods that improve T lymphocyte engineering that use in vivo delivery platforms are needed.

[0005] In vivo delivery platforms using fusogenic glycoproteins of viral vectors have been shown to be beneficial for targeting, binding, and transducing cells of interest. Certain fusogenic glycoproteins, however, may not be sufficiently stable or expressed on the surface of the viral vector. Thus, improved fusogenic glycoproteins, fusosomes and viral vectors containing those glycoproteins are needed. The provided disclosure addresses this need.

[0006] The present disclosure provides an antibody or antigen binding fragment thereof that specifically binds CD4, comprising certain heavy chain complementarity determining regions (HCDR1, HCDR2, and HCDR3) and/or light chain complementarity determining regions (LCDR1, LCDR2, and LCDR3). Another embodiment is an antibody or antigen binding fragment thereof specifically binding CD4, comprising certain heavy (VH) and/or light (VL) chain variable regions. The disclosure likewise provides for isolated nucleotides, vectors, and host cells comprising the anti-CD4 antibody or antigen binding fragment thereof.

[0007] The present disclosure also provides a fusion protein comprising a glycoprotein G (G protein), hemagglutinin (H Protein), or hemagglutinin-neuraminidase (HN Protein), or a biologically active portion thereof of the Paramyxoviridae family and at least one disclosed CD4 antibody or antigen binding fragment, wherein the antibody or antigen binding fragment is fused to the C-terminus of the G protein or the biologically active portion thereof.

[0008] The present disclosure also provides a fusosome comprising at least one antibody or antigen binding fragment thereof that specifically binds CD4, and at least one fusogen. The antibody or antigen binding fragment thereof that specifically binds CD4 may be any antibody or antigen binding fragment thereof that specifically binds CD4, including any antibody or antigen binding fragment thereof that specifically binds CD4 described herein. In some embodiments the fusogen and the antibody or antigen binding fragment thereof that specifically binds CD4 are linked within the fusosome, for example via a linker sequence. In some embodiments the fusogen and the antibody or antigen binding fragment thereof that specifically binds CD4 are not linked within the fusosome. In some embodiments the fusogen and the antibody or antigen binding fragment thereof that specifically binds CD4 are operably linked. The fusogen may be any fusogen, including any fusogen described herein. In some embodiments the fusogen is a G protein, including any G protein described herein. The present disclosure also provides a viral vector comprising a F protein molecule or biologically active portion thereof of the Paramyxoviridae family, an envelope glycoprotein G (G protein), hemagglutinin (H Protein), or hemagglutinin-neuraminidase (HN Protein), or a biologically active portion thereof of the Paramyxoviridae family, and at least one disclosed CD4 antibody or antigen binding fragment thereof, wherein the antibody or antigen binding fragment thereof is attached to the C-terminus of the G protein or the biologically active portion thereof.

[0009] The present disclosure likewise relates to methods of selectively modulating and transducing CD4+ T cells using the disclosed fusosomes or viral vectors. Also disclosed are methods of delivering an exogenous agent to a subject, comprising administering to the subject the disclosed fusosomes or viral vectors, in which the fusosomes or viral vector further comprises an exogenous agent. The present disclosure also relates to methods of treating cancer in a subject, comprising administering to the subject the disclosed viral vectors, and corresponding first and second medical uses.

[0010] The present disclosure also provides compositions comprising the fusosomes or fusion proteins or viral vectors of the invention, comprising an antibody or antigen binding fragment thereof that specifically binds CD4, for use as a medicament.

[0011] The present disclosure also provides compositions comprising the fusosomes or fusion proteins or viral vectors of the invention, comprising an antibody or antigen binding fragment thereof that specifically binds CD4, for use in a method of treating cancer.

### BRIEF DESCRIPTION OF DRAWINGS

[0012] FIG. 1 shows an exemplary system for administration of a lentiviral vector comprising a CD4 binding agent to a subject.

[0013] FIG. 2 shows off-target transduction of certain CD4 binders using CD4 knockout SupT1 cells and HEK-293T cells, as assessed by measuring percentage of GFP-expressing cells with flow cytometry.

[0014] FIG. 3 shows the flow cytometry data for CD4 retargeted fusogens on PBMCs.

[0015] FIG. 4 shows the percent of GFP+ cells of retargeted fusogens in donor PBMCs.

[0016] FIG. 5A shows tumor burden at Day 21 in CD19+ tumor bearing mice treated with 2.5E6, 5E6, or 1E7 integrating units (IU) of Binder 256, as assessed by bioluminescence imaging.

[0017] FIG. 5B shows tumor burden at Day 21 in CD19+ tumor bearing mice treated with 2.5E6, 5E6, or 1E7 IU of a CD8 Binder Control, as assessed by bioluminescence imaging.

[0018] FIG. 5C shows tumor burden at Day 21 in CD19+ tumor bearing mice treated with 2.5E6, 5E6, or 1E7 integrating units IU of Binder 75, as assessed by bioluminescence imaging.

[0019] FIG. 5D shows the percentage of CD4+ T cells that express CAR at Day 15 in CD19+ tumor bearing mice treated with 2.5E6, 5E6, or 1E7 integrating units (IU) of CD4-targeted CD19 CAR fusosomes, as assessed by flow cytometry.

### DETAILED DESCRIPTION

[0020] Unless defined otherwise, all terms of art, notations, and other technical and scientific terms or terminology used herein are intended to have the same meaning as is commonly understood by one of ordinary skill in the art to which the claimed subject matter pertains. In some cases, terms with commonly understood meanings are defined herein for clarity and/or for ready reference, and the inclusion of such definitions herein should not necessarily be construed to represent a substantial difference over what is generally understood in the art, unless such differences are expressly noted.

[0021] Unless defined otherwise, all technical and scientific terms, acronyms, and abbreviations used herein have the same meaning as commonly understood by one of ordinary skill in the art to which the disclosure pertains. Unless indicated otherwise, abbreviations and symbols for chemical and biochemical names is per IUPAC-IUB nomenclature. Unless indicated otherwise, all numerical ranges are inclusive of the values defining the range as well as all integer values in-between.

[0022] As used herein, the articles “a” and “an” refer to one or to more than one (i.e. to at least one) of the grammatical object of the article. By way of example, “an element” means one element or more than one element.

[0023] As used herein, the term “about” will be understood by persons of ordinary skill in the art and will vary to some extent on the context in which it is used. In some embodiments, the term “about” when referring to a measurable value such as an amount, a temporal duration, and the like, is meant to encompass art-accepted variations based on standard errors in making such measurements. In some embodiments, the term “about” when referring to such values, is meant to encompass variations of ±20% or ±10%, more preferably ±5%, even more preferably ±1%, and still more preferably ±0.1% from the specified value, as such variations are appropriate to perform the disclosed methods.

[0024] As used herein, “CD4” or “cluster of differentiation 4” refers to a transmembrane glycoprotein which is a specific marker for a subclass of T cells (which includes helper T cells). The CD4 protein acts as a co-receptor together with the T cell receptor (TCR) to recognize antigen presentation by MHC class II cells. CD4 plays a role in the development of T cells and activation of mature T cells.

[0025] As used herein, “affinity” refers to the strength of the sum total of noncovalent interactions between a single binding site of a molecule (e.g., an antibody) and its binding partner (e.g., an antigen). The affinity of a molecule for its partner can generally be represented by the equilibrium dissociation constant (K_{D}) (or its inverse equilibrium association constant, KA). Affinity can be measured by common methods known in the art, including those described herein. See, for example, surface plasmon resonance methods described in Pope M. E., Soste M. V., Eyford B. A., Anderson N. L., Pearson T. W., (2009) J. Immunol. Methods. 341(1-2):86-96, and methods described therein.

[0026] As used herein, “antibody” is meant in a broad sense and includes immunoglobulin molecules including monoclonal antibodies including murine, human, humanized, and chimeric antibodies, antibody fragments, bispecific or multispecific antibodies formed from at least two intact antibodies or antibody fragments, dimeric, tetrameric or multimeric antibodies, single chain antibodies, and any other modified configuration of the immunoglobulin molecule that comprises an antigen recognition site of the required specificity.

[0027] Immunoglobulins can be assigned to five major classes, namely IgA, IgD, IgE, IgG, and IgM, depending on the heavy chain constant domain amino acid sequence. IgA and IgG are further sub-classified to IgA1, IgA2, IgG1, IgG2, IgG3, and IgG4. Antibody light chains of any vertebrate species can be assigned to one of two types, namely kappa (κ) and lambda (A), based on the amino acid sequences of their constant domains.

[0028] As used herein, “antigen binding fragment” or “antibody fragment” refers to a portion of an immunoglobulin molecule that retains the heavy chain and/or the light chain antigen binding site, such as the heavy chain complementarity determining regions (HCDR) 1 (HCDR1), 2 (HCDR2), and 3 (HCDR3), the light chain complementarity determining regions (LCDR) 1 (LCDR1), 2 (LCDR2), and 3 (LCDR3), the heavy chain variable region (VH), or the light chain variable region (VL). Antibody fragments include a Fab fragment (a monovalent fragment comprising the VL or the VH); a F (ab) 2 fragment (a bivalent fragment comprising two Fab fragments linked by a disulfide bridge at the hinge region); a Fd fragment comprising the VH and CH1 domains; a Fv fragment comprising the VL and VH domains of a single arm of an antibody; a dAb fragment, which comprises a VH domain; and a variable domain (e.g., VNAR, VHH, etc.) from, e.g., human, shark, or camelid origin. VH and VL domains can be engineered and linked together via one or more synthetic linkers to form various types of single chain antibody designs in which the VH/VL domains pair intramolecularly, or intermolecularly in those cases in which the VH and VL domains are expressed by separate single chain antibody constructs, to form a monovalent antigen binding site, such as a single-chain Fv (scFv) or diabody. Such antibody fragments may be obtained using well known techniques and the fragments may be characterized in the same manner as are intact antibodies.

[0029] An antibody variable region comprises a “framework” region interrupted by three “antigen binding sites.” The antigen binding sites are defined using various terms, including, for example (i) “Complementarity Determining Regions” (CDRs), three in the VH (HCDR1, HCDR2, HCDR3) and three in the VL (LCDR1, LCDR2, LCDR3) (Wu and Kabat, J Exp Med 132:211-50, 1970; Kabat et al., Sequences of Proteins of Immunological Interest, 5th Ed. Public Health Service, National Institutes of Health, Bethesda, Md., 1991), and (ii) “Hypervariable regions,” “HVR,” or “HV,” three in the VH (H1, H2, H3) and three in the VL (L1, L2, L3) (Chothia and Lesk Mol Biol 196:901-17, 1987). Other terms include “IMGT-CDRs” (Lefranc et al., Dev Comparat Immunol 27:55-77, 2003) and “Specificity Determining Residue Usage” (SDRU) (Almagro Mol Recognit, 17:132-43, 2004). The International ImMunoGeneTics (IMGT) database (http://www_imgt org) provides a standardized numbering and definition of antigen-binding sites. The correspondence between CDRs, HVs, and IMGT delineations is described in Lefranc et al., Dev Comparat Immunol 27:55-77, 2003.

[0030] The term “framework,” or “FR” or “framework sequence” refers to the remaining sequences of a variable region other than those sequences defined to be antigen binding sites. Because the antigen binding site can be defined by various terms as described above, the exact amino acid sequence of a framework depends on how the antigen-binding site was defined.

[0031] The term “CDR” denotes a complementarity determining region as defined by at least one manner of identification to one of skill in the art. The precise amino acid sequence boundaries of a given CDR or FR can be readily determined using any of a number of well-known schemes, including those described by Kabat et al. (1991), “Sequences of Proteins of Immunological Interest,” 5th Ed. Public Health Service, National Institutes of Health, Bethesda, MD (“Kabat” numbering scheme); Al-Lazikani et al., (1997) JMB 273,927-948 (“Chothia” numbering scheme); MacCallum et al., J. Mol. Biol. 262:732-745 (1996), “Antibody-antigen interactions: Contact analysis and binding site topography,” J. Mol. Biol. 262, 732-745.” (“Contact” numbering scheme); Lefranc M P et al., “IMGT unique numbering for immunoglobulin and T cell receptor variable domains and Ig superfamily V-like domains,” Dev Comp Immunol, 2003 January; 27(1):55-77 (“IMGT” numbering scheme); Honegger A and Plückthun A, “Yet another numbering scheme for immunoglobulin variable domains: an automatic modeling and analysis tool,” J Mol Biol, 2001 Jun. 8; 309(3):657-70, (“Aho” numbering scheme); and Martin et al., “Modeling antibody hypervariable loops: a combined algorithm,” PNAS, 1989, 86(23):9268-9272, (“AbM” numbering scheme).

[0032] The boundaries of a given CDR or FR may vary depending on the scheme used for identification. For example, the Kabat scheme is based on structural alignments, while the Chothia scheme is based on structural information. Numbering for both the Kabat and Chothia schemes is based upon the most common antibody region sequence lengths, with insertions accommodated by insertion letters, for example, “30a,” and deletions appearing in some antibodies. The two schemes place certain insertions and deletions (“indels”) at different positions, resulting in differential numbering. The Contact scheme is based on analysis of complex crystal structures and is similar in many respects to the Chothia numbering scheme. The AbM scheme is a compromise between the Kabat and Chothia definitions based on that used by Oxford Molecular's AbM antibody modeling software.

[0033] In some embodiments, CDRs are defined in accordance with any of the Chothia numbering schemes, the Kabat numbering scheme, the IMGT numbering scheme, a combination of Kabat, IMGT, and Chothia, the AbM definition, and/or the contact definition. A sdAb variable domain comprises three CDRs, designated CDR1, CDR2, and CDR3. Table 1, below, lists exemplary position boundaries of CDR-H1, CDR-H2, CDR-H3 as identified by Kabat, Chothia, AbM, and Contact schemes, respectively. For CDR-H1, residue numbering is listed using both the Kabat and Chothia numbering schemes. FRs are located between CDRs, for example, with FR-H1 located before CDR-H1, FR-H2 located between CDR-H1 and CDR-H2, FR-H3 located between CDR-H2 and CDR-H3 and so forth. It is noted that because the shown Kabat numbering scheme places insertions at H35A and H35B, the end of the Chothia CDR-H1 loop when numbered using the shown Kabat numbering convention varies between H32 and H34, depending on the length of the loop.

TABLE 1
Boundaries of CDRs according to various numbering schemes.

| CDR | Kabat | Chothia | AbM | Contact |
|---|---|---|---|---|
| CDR-H1 | H31--H35B | H26--H32 . . . | H26--H35B | H30--H35B |
| (Kabat | | 34 | | |
| Numbering¹) | | | | |
| CDR-H1 | H31--H35 | H26--H32 | H26--H35 | H30--H35 |
| (Chothia | | | | |
| Numbering²) | | | | |
| CDR-H2 | H50--H65 | H52--H56 | H50--H58 | H47--H58 |
| CDR-H3 | H95--H102 | H95--H102 | H95--H102 | H93--H101 |

¹Kabat et al. (1991), “Sequences of Proteins of Immunological Interest,” 5th Ed. Public Health Service, National Institutes of Health, Bethesda, MD
²Al-Lazikani et al., (1997) JMB 273,927-948.

[0034] Thus, unless otherwise specified, a “CDR” or “complementary determining region,” or individual specified CDRs (e.g., CDR-H1, CDR-H2, CDR-H3), of a given antibody or region thereof, such as a variable region thereof, should be understood to encompass a (or the specific) complementary determining region as defined by any of the aforementioned schemes. For example, where it is stated that a particular CDR (e.g., a CDR-H3) contains the amino acid sequence of a corresponding CDR in a given sdAb amino acid sequence, it is understood that such a CDR has a sequence of the corresponding CDR (e.g., CDR-H3) within the sdAb, as defined by any of the aforementioned schemes. It is understood that any antibody, such as a sdAb, includes CDRs and such can be identified according to any of the other aforementioned numbering schemes or other numbering schemes known to a skilled artisan.

[0035] As used herein, “Fv” refers to the minimum antibody fragment which contains a complete antigen-recognition and antigen-binding site. This region comprises a dimer of one heavy chain and one light chain variable domain in tight, non-covalent association. It is in this configuration that the three hypervariable regions of each variable domain interact to define an antigen-binding site on the surface of the VH-VL dimer. Collectively, the six hypervariable regions confer antigen-binding specificity to the antibody. However, even a single variable domain (or half of an Fv comprising only three hypervariable regions specific for an antigen) may have the ability to recognize and bind an antigen, although at a lower affinity than the entire binding site.

[0036] As used herein, “single-chain Fv” or “scFv” antibody fragments comprise the VH and VL domains of an antibody, wherein these domains are present in a single polypeptide chain. Preferably, the Fv polypeptide further comprises a linker (e.g., a polypeptide linker) between the VH and VL domains which enables the scFv to form the desired structure for antigen binding. For a review of scFv see Pluckthun in The Pharmacology of Monoclonal Antibodies, vol. 113, Rosenburg and Moore eds., Springer-Verlag, New York, pp. 269-315 (1994).

[0037] As used herein, “VHH” or “VHH antibodies” refer to single domain antibodies that comprise the variable (antigen binding) domain of the heavy chain antibody (HCAb or hcIgG) molecules produced by Camelidae family mammals (e.g., llamas, camels, and alpacas).

[0038] As used herein, “VNAR” or “VNAR antibodies” refer to single domain antibodies that comprise the variable (antibody binding) domain of the shark immunoglobulin new antigen receptors (IgNARs).

[0039] As used herein, the term “specifically binds” to a target molecule, such as an antigen, means that a binding molecule, such as a single domain antibody, reacts or associates more frequently, more rapidly, with greater duration, and/or with greater affinity with a particular target molecule than it does with alternative molecules. A binding molecule, such as a sdAb or scFv, “specifically binds” to a target molecule if it binds with greater affinity, avidity, more readily, and/or with greater duration than it binds to other molecules. It is understood that a binding molecule, such as a sdAb or scFv, that specifically binds to a first target may or may not specifically bind to a second target. As such, “specific binding” does not necessarily require (although it can include) exclusive binding.

[0040] As used herein, “percent (%) sequence identity” with respect to an amino acid or nucleic acid sequence is defined as the percentage of amino acid or nucleic acid residues in a candidate sequence that are identical with the amino acid or nucleic acid residues in another amino acid or nucleic acid sequence, after aligning the sequences and introducing gaps, if necessary, to achieve the maximum percent sequence identity, and not considering any conservative substitutions as part of the sequence identity. Percent identity between nucleic acid sequences may be determined using a suite of commonly used and freely available sequence comparison algorithms provided by the National Center for Biotechnology Information (NCBI) Basic Local Alignment Search Tool (BLAST) (Altschul, S. F. et al. (1990) J. Mol. Biol. 215:403-410), which is available from several sources, including the NCBI, Bethesda, Md., and on the Internet at http://www.ncbi.nlm.nih.gov/BLAST/. Those skilled in the art can determine appropriate parameters for measuring alignment, including any algorithms needed to achieve maximal alignment over the full length of the sequences being compared.

[0041] An amino acid substitution may include but is not limited to the replacement of one amino acid in a polypeptide with another amino acid. Exemplary substitutions are shown in Table 2. Amino acid substitutions may be introduced into an antibody of interest and the products screened for a desired activity, for example, retained/improved binding.

TABLE 2

| Original Residue | Exemplary Substitutions |
|---|---|
| Ala (A) | Val; Leu; Ile |
| Arg (R) | Lys; Gln; Asn |
| Asn (N) | Gln; His; Asp, Lys; Arg |
| Asp (D) | Glu; Asn |
| Cys (C) | Ser; Ala |
| Gln (Q) | Asn; Glu |
| Glu (E) | Asp; Gln |
| Gly (G) | Ala |
| His (H) | Asn; Gln; Lys; Arg |
| Ile (I) | Leu; Val; Met; Ala; Phe; Norleucine |
| Leu (L) | Norleucine; Ile; Val; Met; Ala; Phe |
| Lys (K) | Arg; Gln; Asn |
| Met (M) | Leu; Phe; Ile |
| Phe (F) | Trp; Leu; Val; Ile; Ala; Tyr |
| Pro (P) | Ala |
| Ser (S) | Thr |
| Thr (T) | Val; Ser |
| Trp (W) | Tyr; Phe |
| Tyr (Y) | Trp; Phe; Thr; Ser |
| Val (V) | Ile; Leu; Met; Phe; Ala; Norleucine |

[0042] Amino acids may be grouped according to common side-chain properties:
[0043] (1) hydrophobic: Norleucine, Met, Ala, Val, Leu, Ile;
[0044] (2) neutral hydrophilic: Cys, Ser, Thr, Asn, Gln;
[0045] (3) acidic: Asp, Glu;
[0046] (4) basic: His, Lys, Arg;
[0047] (5) residues that influence chain orientation: Gly, Pro;
[0048] (6) aromatic: Trp, Tyr, Phe.

[0049] Non-conservative substitutions will entail exchanging a member of one of these classes for another class. The term, “corresponding to” with reference to nucleotide or amino acid positions of a sequence, such as set forth in the Sequence Listing, refers to nucleotide or amino acid positions identified upon alignment with a target sequence based on structural sequence alignment or using a standard alignment algorithm, such as the GAP algorithm. For example, corresponding residues of a similar sequence (e.g. fragment or species variant) can be determined by alignment to a reference sequence by structural alignment methods. By aligning the sequences, one skilled in the art can identify corresponding residues, for example, using conserved and identical amino acid residues as guides.

[0050] The term “isolated” as used herein refers to a molecule that has been separated from at least some of the components with which it is typically found in nature or produced. For example, a polypeptide is referred to as “isolated” when it is separated from at least some of the components of the cell in which it was produced. When a polypeptide is secreted by a cell after expression, physically separating the supernatant containing the polypeptide from the cell that produced it is considered to be “isolating” the polypeptide. Similarly, a polynucleotide is referred to as “isolated” when it is not part of the larger polynucleotide (such as, for example, genomic DNA or mitochondrial DNA, in the case of a DNA polynucleotide) in which it is typically found in nature, or is separated from at least some of the components of the cell in which it was produced. Thus, a DNA polynucleotide that is contained in a vector inside a host cell may be referred to as “isolated.”

[0051] As used herein, “lipid particle” refers to any biological or synthetic particle that contains a bilayer of amphipathic lipids enclosing a lumen or cavity. Typically, a lipid particle does not contain a nucleus. Examples of lipid particles include nanoparticles, viral-derived particles, or cell-derived particles. Such lipid particles include, but are not limited to, viral particles (e.g. lentiviral particles), virus-like particles, viral vectors (e.g., lentiviral vectors), exosomes, enucleated cells, vesicles (e.g., microvesicles, membrane vesicles, extracellular membrane vesicles, plasma membrane vesicles, and giant plasma membrane vesicles), apoptotic bodies, mitoparticles, pyrenocytes, or lysosomes. In some embodiments, a lipid particle is a fusosome. In some embodiments, the lipid particle is not a platelet.

[0052] As used herein a “biologically active portion,” such as with reference to a protein such as a G protein or an F protein, refers to a portion of the protein that exhibits or retains an activity or property of the full-length of the protein. For example, a biologically active portion of an F protein retains fusogenic activity in conjunction with the G protein when each are embedded in a lipid bilayer. A biologically active portion of the G protein retains fusogenic activity in conjunction with an F protein when each is embedded in a lipid bilayer. The retained activity can include 10%-150% or more of the activity of a full-length or wild-type F protein or G protein. Examples of biologically active portions of F and G proteins include truncations of the cytoplasmic domain, e.g. truncations of up to 1, 2, 3, 4, 5, 6, 7, 8 9, 10, 11, 12, 13, 14, 15, 20, 22, 25, 30, 33, 34, 35, or more contiguous amino acids, see e.g. Khetawat and Broder 2010 Virology Journal 7:312; Witting et al. 2013 Gene Therapy 20:997-1005; published international; patent application No. WO/2013/148327.

[0053] As used herein, “G protein” refers to an envelope attachment glycoprotein G or biologically active portion thereof of the Paramyxoviridae family. “F protein” refers to a fusion protein F or biologically active portion thereof of the Paramyxoviridae family. “H protein” refers to an envelope attachment protein with haemagglutination activity. Morbilliviruses attachment proteins are designated H proteins. “HN protein” refers to an envelope attachment protein with haemagglutination-neuraminidase activity. Respiroviruses, rubulaviruses and avulaviruses attachment proteins are designated HN proteins. H, HN, and G proteins are cell attachment proteins that span the viral envelope and project from the surface as spikes. These proteins bind to proteins on the surface of target cells to facilitate cell entry.

[0054] The F and G proteins may be from a henipavirus, a Hendra (HeV) virus, or a Nipah (NiV) virus, and may be a wild-type protein or may be a variant thereof that exhibits reduced binding for the native binding partner. The F (fusion) and G (attachment) glycoproteins mediate cellular entry of Nipah virus. The G protein initiates infection by binding to the cellular surface receptor ephrin-B2 (EphB2) or EphB3. The subsequent release of the viral genome into the cytoplasm is mediated by the action of the F protein, which induces the fusion of the viral envelope with cellular membranes. The efficiency of transduction of targeted lipid particles can be improved by engineering hyperfusogenic mutations in one or both of the F protein (such as NiV-F) and G protein (such as NiV-G).

[0055] As used herein, “fusosome” refers to a particle containing a bilayer of amphipathic lipids enclosing a lumen or cavity and a fusogen that interacts with the amphipathic lipid bilayer. In some embodiments, the fusosome comprises a nucleic acid. In some embodiments, the fusosome is a membrane enclosed preparation. In some embodiments, the fusosome is derived from a source cell. In some embodiments the fusosme is a vector. In some embodiments the fusosome is an integrating vector. In some embodiments the fusosome is a viral vector. In some embodiments the fusosome is a lipid particle, including a targeted lipid particle, including any lipid particle or targeted lipid particle described herein. As used herein, “fusosome composition” refers to a composition comprising one or more fusosomes.

[0056] As used herein, “fusogen” refers to an agent or molecule that creates an interaction between two membrane enclosed lumens. In embodiments, the fusogen facilitates fusion of the membranes. In other embodiments, the fusogen creates a connection, e.g., a pore, between two lumens (e.g., a lumen of a retroviral vector and a cytoplasm of a target cell). In some embodiments, the fusogen comprises a complex of two or more proteins, e.g., wherein neither protein has fusogenic activity alone. In some embodiments, the fusogen comprises a targeting domain.

[0057] As used herein, a “re-targeted fusogen” refers to a fusogen that comprises a targeting moiety having a sequence that is not part of the naturally-occurring form of the fusogen. In embodiments, the fusogen comprises a different targeting moiety relative to the targeting moiety in the naturally-occurring form of the fusogen. In embodiments, the naturally-occurring form of the fusogen lacks a targeting domain, and the re-targeted fusogen comprises a targeting moiety that is absent from the naturally-occurring form of the fusogen. In embodiments, the fusogen is modified to comprise a targeting moiety. In embodiments, the fusogen comprises one or more sequence alterations outside of the targeting moiety relative to the naturally-occurring form of the fusogen, e.g., in a transmembrane domain, fusogenically active domain, or cytoplasmic domain.

[0058] As used herein, a “targeted envelope protein” refers to a polypeptide that contains a G protein (G protein), hemagglutinin (H Protein), or hemagglutinin-neuraminidase (HN Protein), of the Paramyxoviridae family attached to a single domain antibody (sdAb) variable domain, such as a VL or VH sdAb, a scFv, a nanobody, a camelid VHH domain, a shark VNAR, or fragments thereof, that target a molecule on a desired cell type. In some such embodiments, the attachment may be direct or indirect via a linker, such as a polypeptide linker. The “targeted envelope protein” may also be referred to as a “fusion protein” comprising the G protein and antibodies or antigen binding fragments of the disclosure in which the antibody or antigen binding fragment is fused to the C-terminus of the G protein or a biologically active portion thereof.

[0059] As used herein, a “targeted lipid particle” refers to a lipid particle that contains a targeted envelope protein embedded in the lipid bilayer, e.g., targeting CD4. Such targeted lipid particles can be a viral particle, a virus-like particle, a nanoparticle, a vesicle, an exosome, a dendrimer, a lentivirus, a viral vector, an enucleated cell, a microvesicle, a membrane vesicle, an extracellular membrane vesicle, a plasma membrane vesicle, a giant plasma membrane vesicle, an apoptotic body, a mitoparticle, a pyrenocyte, a lysosome, another membrane enclosed vesicle, a lentiviral vector, a viral based particle, a virus like particle (VLP), or a cell derived particle.

[0060] As used herein, a “retroviral nucleic acid” refers to a nucleic acid containing at least the minimal sequence requirements for packaging into a retrovirus or retroviral vector, alone or in combination with a helper cell, helper virus, or helper plasmid. In some embodiments, the retroviral nucleic acid further comprises or encodes an exogenous agent, a positive target cell-specific regulatory element, a non-target cell-specific regulatory element (TCSRE), or a negative TCSRE. In some embodiments, the retroviral nucleic acid comprises one or more of (e.g., all of) a 5′ LTR (e.g., to promote integration), U3 (e.g., to activate viral genomic RNA transcription), R (e.g., a Tat-binding region), U5, a 3′ LTR (e.g., to promote integration), a packaging site (e.g., psi (′)), and RRE (e.g., to bind to Rev and promote nuclear export). The retroviral nucleic acid can comprise RNA (e.g., when part of a virion) or DNA (e.g., when being introduced into a source cell or after reverse transcription in a recipient cell). In some embodiments, the retroviral nucleic acid is packaged using a helper cell, helper virus, or helper plasmid which comprises one or more of (e.g., all of) gag, pol, and env.

[0061] As used herein, a “target cell” refers to a cell of a type to which it is desired that a targeted lipid particle delivers an exogenous agent. In embodiments, a target cell is a cell of a specific tissue type or class, e.g., an immune effector cell, e.g., a T cell. In some embodiments, a target cell is a diseased cell, e.g., a cancer cell. In some embodiments, the fusogen, e.g., a re-targeted fusogen, leads to preferential delivery of the exogenous agent to a target cell compared to a non-target cell.

[0062] As used herein a “non-target cell” refers to a cell of a type to which it is not desired that a targeted lipid particle delivers an exogenous agent. In some embodiments, a non-target cell is a cell of a specific tissue type or class. In some embodiments, a non-target cell is a non-diseased cell, e.g., a non-cancerous cell. In some embodiments, the fusogen, e.g., a re-targeted fusogen, leads to lower delivery of the exogenous agent to a non-target cell compared to a target cell.

[0063] The term “effective amount” as used herein means an amount of a pharmaceutical composition which is sufficient to significantly and positively modify the symptoms and/or conditions to be treated (e.g., provide a positive clinical response). The effective amount of the targeted lipid particles of the disclosure for use in a pharmaceutical composition will vary with the particular condition being treated, the severity of the condition, the duration of treatment, the nature of concurrent therapy, the particular lipid particle being employed, the particular pharmaceutically-acceptable excipient(s) and/or carrier(s) utilized, and like factors within the knowledge and expertise of the attending physician.

[0064] An “exogenous agent” as used herein with reference to a targeted lipid particle, refers to an agent that is neither comprised by nor encoded in the corresponding wild-type virus or fusogen made from a corresponding wild-type source cell. In some embodiments, the exogenous agent does not naturally exist, such as a protein or nucleic acid that has a sequence that is altered (e.g., by insertion, deletion, or substitution) relative to a naturally occurring protein. In some embodiments, the exogenous agent does not naturally exist in the source cell. In some embodiments, the exogenous agent exists naturally in the source cell but is exogenous to the virus. In some embodiments, the exogenous agent does not naturally exist in the recipient cell. In some embodiments, the exogenous agent exists naturally in the recipient cell, but is not present at a desired level or at a desired time. In some embodiments, the exogenous agent comprises DNA, RNA, or protein.

[0065] As used herein, a “promoter” refers to a cis-regulatory DNA sequence that, when operably linked to a gene coding sequence, drives transcription of the gene. The promoter may comprise one or more transcription factor binding sites. In some embodiments, a promoter works in concert with one or more enhancers which are distal to the gene.

[0066] As used herein, “operably linked” refers to a polynucleotide sequence that is joined to a regulatory region sequence in a manner that allows expression of the polynucleotide sequence. A regulatory region sequence directs transcription of a polynucleotide sequence, and can include enhancer sequences, response elements, protein recognition sites, inducible elements, promoter control elements, 5′ and 3′ untranslated regions protein binding sequences, transcriptional start sites, termination sequences, polyadenylation sequences, and introns.

[0067] As used herein, a composition refers to any mixture of two or more products, substances, or compounds, including cells. It may be a solution, a suspension, a liquid, a powder, a paste, aqueous, non-aqueous, or any combination thereof.

[0068] As used herein, the term “pharmaceutically acceptable” refers to a material, such as a carrier or diluent, which does not abrogate the biological activity or properties of a therapeutic compound, and is relatively nontoxic, i.e., the material may be administered to an individual without causing undesirable biological effects or interacting in a deleterious manner with any of the components of the composition in which it is contained.

[0069] As used herein, the term “pharmaceutical composition” refers to a mixture of at least one targeted lipid particle of the disclosure with other chemical components, such as carriers, stabilizers, diluents, dispersing agents, suspending agents, thickening agents, and/or excipients. The pharmaceutical composition facilitates administration of the targeted lipid particle to an organism. Multiple techniques of administering targeted lipid particles of the disclosure exist in the art including, but not limited to, intravenous, oral, aerosol, parenteral, ophthalmic, pulmonary, and topical administration.

[0070] A “disease” or “disorder” as used herein refers to a condition for which treatment is needed and/or desired.

[0071] As used herein, the terms “treat,” “treating,” or “treatment” refer to ameliorating a disease or disorder, e.g., slowing or arresting or reducing the development of the disease or disorder or reducing at least one of the clinical symptoms thereof. For purposes of this disclosure, ameliorating a disease or disorder can include obtaining a beneficial or desired clinical result that includes, but is not limited to, any one or more of: alleviation of one or more symptoms, diminishment of extent of disease, preventing or delaying spread (for example, metastasis, for example metastasis to the lung or to the lymph node) of disease, preventing or delaying recurrence of disease, delay or slowing of disease progression, amelioration of the disease state, inhibiting the disease or progression of the disease, inhibiting or slowing the disease or its progression, arresting its development, and remission (whether partial or total).

[0072] The terms “individual” and “subject” are used interchangeably herein to refer to an animal; for example a mammal. The terms include human and veterinary animals. In some embodiments, methods of treating animals, including, but not limited to, humans, rodents, simians, felines, canines, equines, bovines, porcines, ovines, caprines, mammalian laboratory animals, mammalian farm animals, mammalian sport animals, and mammalian pets, are provided. The animal can be male or female and can be any suitable age, including infant, juvenile, adolescent, adult, and geriatric. In some examples, an “individual” or “subject” refers to an animal in need of treatment for a disease or disorder. In some embodiments, the animal to receive the treatment is a “patient,” designating the fact that the animal has been identified as having a disorder of relevance to the treatment, or being at adequate risk of contracting the disorder. In particular embodiments, the animal is a human, such as a human patient.

### CD4-Specific Antibodies

[0073] Described herein are novel antibodies and antigen binding fragments thereof that specifically target and bind CD4. In some embodiments, the antibodies or antigen binding fragments thereof cross-react with cynomolgus (or “cyno”) or M. nemestrina CD4. In some embodiments, the antibodies or antigen binding fragments thereof are single-chain variable fragments (scFvs) composed of the antigen-binding domains derived from the heavy (VH) and the light (VL) chains of an IgG molecule and connected via a linker domain. In some embodiments, the antibodies or antigen binding fragments thereof are VHHs or VNARs that correspond to the antigen binding domains of the camelid and shark IgG molecules, respectively. The present disclosure also provides polynucleotides encoding the antibodies and fragments thereof, vectors, and host cells, and methods of using the antibodies or antigen binding fragments thereof. In some embodiments, e.g., the antibodies or antigen binding fragments thereof fuse to a glycoprotein (G Protein), hemagglutinin (H Protein), or hemagglutinin-neuraminidase (HN Protein) of the Paramyxoviridae family for targeted binding and transduction to cells.

[0074] Sequences for exemplary antibodies and antigen binding fragments of the disclosure using the Kabat numbering scheme are shown in Tables 19-22 below. Sequences for exemplary HCDRs and LCDRs of the disclosure are shown in Table 22.

[0075] The sequences for the disclosed VH and VL domains are provided in Tables 20-21. Tables 23-24 provided herein show the CDR sequences of the disclosed antibodies and antigen binding fragments thereof using both Chothia and IMGT numbering schemes, respectively. The full CD4 binder sequences of the variant CD4 scFvs and VHHs of the disclosure are shown in Table 19.

[0076] In some embodiments, an antibody or antigen binding fragment thereof capable of binding CD4 is disclosed, comprising a heavy chain variable region and a light chain variable region, wherein the heavy chain variable region comprises three heavy chain complementarity determining regions (HCDR1, HCDR2, and HCDR3), and the light chain variable region comprises three light chain complementarity determining regions (LCDR1, LCDR2, and LCDR3). In some embodiments, the HCDR1, HCDR2, HCDR3, LCDR1, LCDR2, and LCDR3 comprise amino acid sequences of any one of the SEQ ID NOs recited in Table 22. In some embodiments, the heavy chain variable region (VH) comprises an amino acid sequence of any one of SEQ ID NOs: 256-511, 9447-9576, or 14000-14002 (Table 20) and the light chain variable region (VL) comprises an amino acid sequence of any one of SEQ ID NOs: 512-766 or 9577-9706 (Table 21).

[0077] In another embodiment, the antibody or antigen binding fragment thereof comprises a VH having an amino acid sequence with at least 90%, 95%, 96%, 97%, 98%, 99%, or 100% identity to a sequence selected from SEQ ID NOs: 256-511, 9447-9576, or 14000-14002.

[0078] In another embodiment, the antibody or antigen binding fragment thereof comprises a VL having an amino acid sequence with at least 90%, 95%, 96%, 97%, 98%, 99%, or 100% identity to a sequence selected from SEQ ID NOs: 512-766 or 9577-9706.

[0079] In another embodiment, the antibody or antigen binding fragment comprises a VH having an amino acid sequence with at least 90%, 95%, 96%, 97%, 98%, 99%, or 100% identity to a sequence selected from SEQ ID NOs: 256-511, 9447-9576, or 14000-14002 and a VL having an amino acid sequence with at least 90%, 95%, 96%, 97%, 98%, 99%, or 100% identity to a sequence selected from SEQ ID NOs: 512-766 or 9577-9706.

[0080] In another embodiment, the antibody or antigen binding fragment thereof comprises a VH having an amino acid sequence with at least 90%, 95%, 96%, 97%, 98%, 99%, or 100% identity to SEQ ID NO: 256.

[0081] In another embodiment, the antibody or antigen binding fragment thereof comprises the VH of SEQ ID NO: 304 and the VL of SEQ ID NO: 559.

[0082] In another embodiment, the antibody or antigen binding fragment thereof comprises the VH of SEQ ID NO: 331 and the VL of SEQ ID NO: 586.

[0083] In another embodiment, the antibody or antigen binding fragment thereof comprises the VH of SEQ ID NO: 9554 and the VL of SEQ ID NO: 9684.

[0084] In another embodiment, the antibody or antigen binding fragment thereof comprises the VH of SEQ ID NO: 256.

[0085] In another embodiment, the antibody or antigen binding fragment thereof comprises the HCDR1, HCDR2, HCDR3, LCDR1, LCDR2, and LCDR3 of SEQ ID NOs: 1308, 1822, 2336, 5672, 6182, 6692, respectively.

[0086] In another embodiment, the antibody or antigen binding fragment thereof comprises the HCDR1, HCDR2, HCDR3, LCDR1, LCDR2, and LCDR3 of SEQ ID NOs: 1376, 1890, 2404, 5740, 6250, 6760, respectively.

[0087] In another embodiment, the antibody or antigen binding fragment thereof comprises the HCDR1, HCDR2, HCDR3, LCDR1, LCDR2, and LCDR3 of SEQ ID NOs: 10074, 10336, 10598, 12300, 12560, 12820, respectively.

[0088] In another embodiment, the antibody or antigen binding fragment thereof comprises the HCDR1, HCDR2, and HCDR3 of SEQ ID NOs: 1535, 2049, 2563, respectively.

[0089] In some embodiments, the single domain antibody is human or humanized. In some embodiments, the single domain antibody or portion thereof is naturally occurring. In some embodiments, the single domain antibody or portion thereof is synthetic.

[0090] In some embodiments, the single domain antibodies are antibodies whose complementary determining regions are part of a single domain polypeptide. In some embodiments, the single domain antibody is a heavy chain only antibody variable domain. In some embodiments, the single domain antibody does not include light chains.

[0091] In various embodiments, any of the antibodies or antigen binding fragments described herein comprise a heavy chain constant region and a light chain constant region. The heavy chain constant region may be an IgG, IgM, IgA, IgD, or IgE isotype, or a derivative or fragment thereof that retains at least one effector function of the intact heavy chain. The heavy chain constant region may be a human IgG isotype. The heavy chain constant region may be a human IgG1 or human IgG4 isotypes. The heavy chain constant region may be a human IgG1 isotype. The light chain constant region may be a human kappa light chain or lambda light chain or a derivative or fragment thereof that retains at least one effector function of the intact light chain. The light chain constant region may be a human kappa light chain.

[0092] In various embodiments, any of the disclosed antibodies or antigen binding fragments may be a rodent antibody or antigen binding fragment thereof, a chimeric antibody or an antigen binding fragment thereof, a CDR-grafted antibody or an antigen binding fragment thereof, or a humanized antibody or an antigen binding fragment thereof. In another embodiment, any of the disclosed antibodies or antigen binding fragments comprises human or human-derived heavy and light chain variable regions, including human frameworks or human frameworks with one or more backmutations. In various embodiments, any of the disclosed antibodies or antigen binding fragments may be a Fab, Fab′, F(ab′)2, Fd, scFv, (scFv)2, scFv-Fc, VHH, or Fv fragment.

[0093] Antibodies whose heavy chain CDR, light chain CDR, VH, or VL amino acid sequences differ insubstantially from those shown in Tables 19-24 are encompassed within the scope of the disclosure. Typically, this involves one or more conservative amino acid substitutions with an amino acid having similar charge, hydrophobic, or stereo chemical characteristics in the antigen-binding site or in the framework without adversely altering the properties of the antibody. Conservative substitutions may also be made to improve antibody properties, for example stability or affinity. 1, 2, 3, 4, 5, 6, 7, 8, 9, 10, 11, 12, 13, 14, or 15 amino acid substitutions can be made to the VH or VL sequence. For example, a “conservative amino acid substitution” may involve a substitution of a native amino acid residue with a nonnative residue such that there is little or no effect on the polarity or charge of the amino acid residue at that position. Desired amino acid substitutions can be determined by those skilled in the art at the time such substitutions are desired. For example, amino acid substitutions can be used to identify important residues of the molecule sequence, or to increase or decrease the affinity of the molecules described herein. The following eight groups contain amino acids that are conservative amino acid substitutions for one another: 1) Alanine (A), Glycine (G); 2) Aspartic acid (D), Glutamic acid (E); 3) Asparagine (N), Glutamine (Q); 4) Arginine (R), Lysine (K); 5) Isoleucine (I), Leucine (L), Methionine (M), Valine (V); 6) Phenylalanine (F), Tyrosine (Y), Tryptophan (W); 7) Serine(S), Threonine (T); and 8) Cysteine (C), Methionine (M).

[0094] In some embodiments, the antibody or antigen binding fragment binding CD4 is a single-chain variable fragment. In embodiments involving a single polypeptide containing both a heavy chain variable region and a light chain variable region, both orientations of these variable regions are contemplated. In some cases, the heavy chain variable region is on the N-terminal side of the light chain variable region, which means the heavy chain variable region is closer to the N-terminus of the polypeptide. In other cases, the light chain variable region is on the N-terminal side of the heavy chain variable region, which means the light chain variable region is closer to the N-terminus of the polypeptide than the heavy chain variable region.

[0095] In some embodiments, the scFv binding proteins comprise a linker. In some embodiments, the linker is between the heavy chain variable region (VH) and the light chain variable region (VL) (or vice versa). In some embodiments, the linker comprises the amino acid sequence of GS, GGS, GGGS (SEQ ID NO: 14125), GGGGS (SEQ ID NO: 9294), GGGGGS (SEQ ID NO: 9292), any one of SEQ ID NOs: 9312-9315, or combinations thereof. Substitutions to introduce new disulfide bonds are also within the scope of the disclosure, e.g., by making substitutions G44C in the VH FR 2 and G100C in the VL FR4.

[0096] In some embodiments, the anti-CD4 antibody or antigen binding fragment binds to human CD4 with an affinity constant (K_{D}) of about 1 nM to about 900 nM. In some embodiments, the K_{D} to human CD4 is about 5 nM to about 500 nM, about 6 nM to about 10 nM, about 11 nM to about 20 nM, about 25 nM to about 40 nM, about 40 nM to about 60 nM, about 70 nM to about 90 nM, about 100 nM to about 120 nM, about 125 nM to about 140 nM, about 145 nM to about 160 nM, about 170 nM and to about 200 nM, about 210 nM to about 250 nM, about 260 nM to about 300 nM, about 310 nM to about 350 nM, about 360 nM to about 400 nM, about 410 nM to about 450 nM, and about 460 nM to about 500 nM. In some embodiments, the anti-CD4 antibody or antigen binding fragment binds to human CD4 with an affinity constant (K_{D}) of 500 nM, 400 nM, 300 nM, 200 nM, 100 nM, 50 nM, 20 nM, or 10 nM or lower. In some embodiments, the anti-CD4 antibody or antigen binding fragment binds to human CD4 and CD4 of a non-human primate including cynomolgus, M. mulatta (rhesus monkey), or M. nemestrina CD4 with comparable binding affinity (K_{D}).

[0097] In some embodiments, the anti-CD4 antibody or antigen binding fragment binds to a non-human primate, cynomolgus, M. mulatta (rhesus monkey), or N. nemestrina CD4. In some embodiments, the anti-CD4 antibody or antigen binding binds to mouse, dog, pig, etc., CD4. In some embodiments, the K_{D} to a non-human primate, cynomolgus or M. nemestrina CD4 is about 5 nM to about 500 nM, about 6 nM to about 10 nM, about 11 nM to about 20 nM, about 25 nM to about 40 nM, about 40 nM to about 60 nM, about 70 nM to about 90 nM, about 100 nM to about 120 nM, about 125 nM to about 140 nM, about 145 nM to about 160 nM, about 170 nM and to about 200 nM, about 210 nM to about 250 nM, about 260 nM to about 300 nM, about 310 nM to about 350 nM, about 360 nM to about 400 nM, about 410 nM to about 450 nM, and about 460 nM to about 500 nM. In some embodiments, the anti-CD4 antibody or antigen binding fragment binds to cynomolgus or M. nemestrina CD4 with an affinity constant (K_{D}) of 500 nM, 400 nM, 300 nM, 200 nM, 100 nM, 50 nM, 20 nM, or 10 nM or lower.

[0098] An antibody or antigen binding fragment thereof that specifically binds CD4 refers to an antibody or binding fragment that preferentially binds to CD4, respectively, over other antigen targets. As used herein, references to an antibody that “specifically binds CD4” are interchangeable with an “anti-CD4” antibody or an “antibody that binds CD4.” In some embodiments, the antibody or binding fragment capable of binding to CD4 does so with higher affinity for that antigen than others. In some embodiments, the antibody or binding fragment capable of binding CD4 binds to that antigen with a K_{D} of at least about 10-1, 10-2, 10-3, 10-4, 10-5, 10-6, 10-7, 10-8, 10-9, 10-10, 10-11, 10-12 or greater (or any value in between), e.g., as measured by surface plasmon resonance or other methods known to those skilled in the art.

[0099] Another embodiment of the disclosure is an isolated polynucleotide encoding any of the antibody heavy chain variable regions or the antibody light chain variable regions of the disclosure. Certain exemplary polynucleotides are disclosed herein, however, other polynucleotides which, given the degeneracy of the genetic code or codon preferences in a given expression system, encode the antibodies or antigen binding fragments thereof of the disclosure are also within the scope of the disclosure. The polynucleotide sequences encoding a VH or a VL or a fragment thereof of the antibody or antigen binding fragments thereof of the disclosure can be operably linked to one or more regulatory elements, such as a promoter and enhancer, that allow expression of the nucleotide sequence in the intended host cell. The polynucleotide may be a cDNA.

[0100] Another embodiment of the disclosure is a vector comprising the polynucleotide of the disclosure. Such vectors may be plasmid vectors, viral vectors, vectors for baculovirus expression, transposon-based vectors, or any other vector suitable for introduction of the polynucleotide of the disclosure into a given organism or genetic background by any means. For example, polynucleotides encoding light and heavy chain variable regions of the antibodies of the disclosure, optionally linked to constant regions, may be inserted into expression vectors. The light and heavy chains can be cloned in the same or different expression vectors. The DNA segments encoding immunoglobulin chains may be operably linked to control sequences in the expression vector(s) that ensure the expression of immunoglobulin polypeptides. Such control sequences include signal sequences, promoters (e.g., naturally associated or heterologous promoters), enhancer elements, and transcription termination sequences, and are chosen to be compatible with the host cell chosen to express the antibody. Once the vector has been incorporated into the appropriate host, the host is maintained under conditions suitable for high level expression of the proteins encoded by the incorporated polynucleotides.

[0101] Suitable expression vectors are typically replicable in the host organisms either as episomes or as an integral part of the host chromosomal DNA. Commonly, expression vectors contain selection markers such as ampicillin-resistance, hygromycin-resistance, tetracycline resistance, kanamycin resistance, or neomycin resistance to permit detection of those cells transformed with the desired DNA sequences. Suitable vectors, promoter, and enhancer elements are known in the art; many are commercially available for generating subject recombinant constructs.

[0102] Another embodiment of the disclosure is a host cell comprising the vector of the disclosure. The term “host cell” refers to a cell into which a vector has been introduced. It is understood that the term host cell is intended to refer not only to the particular subject cell but to the progeny of such a cell. Because certain modifications may occur in succeeding generations due to either mutation or environmental influences, such progeny may not be identical to the parent cell, but are still included within the scope of the term “host cell” as used herein. Such host cells may be eukaryotic cells, prokaryotic cells, plant cells, or archaeal cells. Escherichia coli, bacilli, such as Bacillus subtilis, and other Enterobacteriaceae, such as Salmonella, Serratia, and various Pseudomonas species are examples of prokaryotic host cells. Other microbes, such as yeast, are also useful for expression. Saccharomyces (e.g., S. cerevisiae) and Pichia are examples of suitable yeast host cells. Exemplary eukaryotic cells may be of mammalian, insect, avian, or other animal origins.

### Fusion Proteins Targeting CD4

[0103] Also provided herein are fusion proteins targeting CD4 that may be exposed on the surface on a lipid particle or viral vector. In some embodiments the fusion protein comprises an envelope glycoprotein G, H, and/or an F protein of the Paramyxoviridae family. In some embodiments, the fusion protein contains a henipavirus envelope attachment glycoprotein G (G protein) or a biologically active portion thereof and a single domain antibody (sdAb) variable domain or a single chain variable fragment (scFv). The sdAb variable domain or scFv can be linked directly or indirectly to the G protein. In particular embodiments, the sdAb variable domain or scFv is linked to the C-terminus (C-terminal amino acid) of the G protein or the biologically active portion thereof. The linkage can be via a peptide linker, such as a flexible peptide linker. Table 25 provides a list of non-limiting examples of G proteins. Exemplary full length fusion protein sequences of the disclosure are disclosed in Table 19.

[0104] In some embodiments, the G protein is of the Paramyxoviridae family. In some embodiments the G protein is a Henipavirus G protein or a biologically active portion thereof. In some embodiments, the Henipavirus G protein is a Hendra (HeV) virus G protein, a Nipah (NiV) virus G-protein (NIV-G), a Cedar (CedPV) virus G-protein, a Mojiang virus G-protein, a bat Paramyxovirus G-protein, or a biologically active portion thereof. In some embodiments, the fusion protein is glycoprotein GP64 of baculovirus, or glycoprotein GP64 variant E45K/T259A. Non-limiting examples of G proteins include those disclosed in Table 25.

[0105] In some embodiments, the attachment G proteins are type II transmembrane glycoproteins containing an N-terminal cytoplasmic tail (e.g., corresponding to amino acids 1-49 of SEQ ID NO: 9266), a transmembrane domain (e.g., corresponding to amino acids 50-70 of SEQ ID NO: 9266), and an extracellular domain containing an extracellular stalk (e.g., corresponding to amino acids 71-187 of SEQ ID NO: 9266), and a globular head (corresponding to amino acids 188-602 of SEQ ID NO: 9266). In such embodiments, the N-terminal cytoplasmic domain is within the inner lumen of the lipid bilayer and the C-terminal portion is the extracellular domain that is exposed on the outside of the lipid bilayer. Regions of the stalk in the C-terminal region (e.g. corresponding to amino acids 159-167 of NiV-G) have been shown to be involved in interactions with F protein and triggering of F protein fusion (Liu et al. 2015 J of Virology 89:1838). In wild-type G protein, the globular head mediates receptor binding to henipavirus entry receptors eprhin B2 and ephrin B3, but is dispensable for membrane fusion (Brandel-Tretheway et al. Journal of Virology. 2019. 93(13)e00577-19). In particular embodiments herein, tropism of the G protein is altered by linkage of the G protein or biologically active fragment thereof (e.g. cytoplasmic truncation) to a sdAb variable domain. Binding of the G protein to a binding partner can trigger fusion mediated by a compatible F protein or a biologically active portion thereof. G protein sequences disclosed herein are predominantly disclosed as expressed sequences including an N-terminal methionine required for start of translation. As such N-terminal methionines are commonly cleaved co- or post-translationally, the mature protein sequences for all G protein sequences disclosed herein are also contemplated as lacking the N-terminal methionine.

[0106] G glycoproteins are highly conserved among henipavirus species. For example, the G proteins of NiV and HeV viruses share 79% amino acid identity. Studies have shown a high degree of compatibility among G proteins with F proteins of different species as demonstrated by heterotypic fusion activation (Brandel-Tretheway et al. Journal of Virology. 2019). As described further below, a targeted lipid particle can contain heterologous G and F proteins from different species.

[0107] In some embodiments, the G protein has a sequence set forth in any of SEQ ID NOs: 9266, 9274, 9285-9288, 9295, 9303, 9305-9037, or is a functionally active variant or biologically active portion thereof that has a sequence that is at least at or about 80%, at least at or about 81%, at least at or about 82%, at least at or about 83%, at least at or about 84%, at least at or about 85%, at least at or about 86%, at least at or about 87%, at least at or about 88%, at least at or about 89%, at least at or about 90%, at least at or about 91%, at least at or about 92%, at least at or about 93%, at least at or about 94%, at least at or about 95%, at least at or about 96%, at least at or about 97%, at least at or about 98%, or at least at or about 99% identical to any one of SEQ ID NOs: 9266, 9274, 9285-9288, 9295, 9303, 9305-9037. In particular embodiments, the G protein or functionally active variant or biologically active portion is a protein that retains fusogenic activity in conjunction with a Henipavirus F protein, such as an F protein (e.g. NiV-F or HeV—F). Fusogenic activity includes the activity of the G protein in conjunction with a Henipavirus F protein to promote or facilitate fusion of two membrane lumens, such as the lumen of the targeted lipid particle having embedded in its lipid bilayer a henipavirus F and G protein, and a cytoplasm of a target cell, e.g. a cell that contains a surface receptor or molecule that is recognized or bound by the targeted envelope protein. In some embodiments, the F protein and G protein are from the same Henipavirus species (e.g. NiV-G and NiV-F). In some embodiments, the F protein and G protein are from different Henipavirus species (e.g. NiV-G and HeV-F).

[0108] In particular embodiments, the G protein has the sequence of amino acids set forth in SEQ ID NOs: 9266, 9274, 9285-9288, 9295, 9303, 9305-9037, or is a functionally active variant thereof or a biologically active portion thereof that retains fusogenic activity. In some embodiments, the functionally active variant comprises an amino acid sequence having at least at or about 80%, at least at or about 85%, at least at or about 90%, at least at or about 91%, at least at or about 92%, at least at or about 93%, at least at or about 94%, at least at or about 95%, at least at or about 96%, at least at or about 97%, at least at or about 98%, or at least at or about 99% sequence identity to any one of SEQ ID NOs: 9266, 9274, 9285-9288, 9295, 9303, 9305-9037 and retains fusogenic activity in conjunction with a Henipavirus F protein (e.g., NiV-F or HeV-F). In some embodiments, the biologically active portion has an amino acid sequence having at least at or about 80%, at least at or about 85%, at least at or about 90%, at least at or about 91%, at least at or about 92%, at least at or about 93%, at least at or about 94%, at least at or about 95%, at least at or about 96%, at least at or about 97%, at least at or about 98%, or at least at or about 99% sequence identity to any one of SEQ ID NOs: 9266, 9274, 9285-9288, 9295, 9303, 9305-9037 and retains fusogenic activity in conjunction with a Henipavirus F protein (e.g., NiV-F or HeV-F).

[0109] Reference to retaining fusogenic activity includes activity (in conjunction with a Henipavirus F protein) that is at or about 10% to at or about 150% or more of the level or degree of binding of the corresponding wild-type G protein, such as set forth in any one of SEQ ID NOs: 9266, 9274, 9285-9288, 9295, 9303, 9305-9037, such as at least or at least about 10% of the level or degree of fusogenic activity of the corresponding wild-type G protein, such as at least or at least about 15% of the level or degree of fusogenic activity of the corresponding wild-type G protein, such as at least or at least about 20% of the level or degree of fusogenic activity of the corresponding wild-type G protein, such as at least or at least about 25% of the level or degree of fusogenic activity of the corresponding wild-type G protein, such as at least or at least about 30% of the level or degree of fusogenic activity of the corresponding wild-type G protein, such as at least or at least about 35% of the level or degree of fusogenic activity of the corresponding wild-type G protein, such as at least or at least about 40% of the level or degree of fusogenic activity of the corresponding wild-type G protein, such as at least or at least about 45% of the level or degree of fusogenic activity of the corresponding wild-type G protein, such as at least or at least about 50% of the level or degree of fusogenic activity of the corresponding wild-type G protein, such as at least or at least about 55% of the level or degree of fusogenic activity of the corresponding wild-type G protein, such as at least or at least about 60% of the level or degree of fusogenic activity of the corresponding wild-type G protein, such as at least or at least about 65% of the level or degree of fusogenic activity of the corresponding wild-type G protein, such as at least or at least about 70% of the level or degree of fusogenic activity of the corresponding wild-type G protein, such as at least or at least about 75% of the level or degree of fusogenic activity of the corresponding wild-type G protein, such as at least or at least about 80% of the level or degree of fusogenic activity of the corresponding wild-type G protein, such as at least or at least about 85% of the level or degree of fusogenic activity of the corresponding wild-type G protein, such as at least or at least about 90% of the level or degree of fusogenic activity of the corresponding wild-type G protein, such as at least or at least about 95% of the level or degree of fusogenic activity of the corresponding wild-type G protein, such as at least or at least about 100% of the level or degree of fusogenic activity of the corresponding wild-type G protein, or such as at least or at least about 120% of the level or degree of fusogenic activity of the corresponding wild-type G protein.

[0110] In some embodiments, the G protein is a mutant G protein that is a functionally active variant or biologically active portion containing one or more amino acid mutations, such as one or more amino acid insertions, deletions, substitutions, or truncations. In some embodiments, the mutations described herein relate to amino acid insertions, deletions, substitutions, or truncations of amino acids compared to a reference G protein sequence. In some embodiments, the reference G protein sequence is the wild-type sequence of a G protein or a biologically active portion thereof. In some embodiments, the functionally active variant or the biologically active portion thereof is a mutant of a wild-type Hendra (HeV) virus G protein, a wild-type Nipah (NiV) virus G-protein (NiV-G), a wild-type Cedar (CedPV) virus G-protein, a wild-type Mojiang virus G-protein, a wild-type bat Paramyxovirus G-protein, or biologically active portions thereof. In some embodiments, the wild-type G protein has the sequence set forth in any one of SEQ ID NOs: 9266, 9274, 9285-9288, 9295, 9303, 9305-9037.

[0111] In some embodiments, the G protein is a mutant G protein that is a biologically active portion that is an N-terminally and/or C-terminally truncated fragment of a wild-type Hendra (HeV) virus G protein, a wild-type Nipah (NiV) virus G-protein (NiV-G), a wild-type Cedar (CedPV) virus G-protein, a wild-type Mojiang virus G-protein, or a wild-type bat Paramyxovirus G-protein. In particular embodiments, the truncation is an N-terminal truncation of all or a portion of the cytoplasmic domain. In some embodiments, the mutant G protein is a biologically active portion that is truncated and lacks up to 49 contiguous amino acid residues at or near the N-terminus of the wild-type G protein, such as a wild-type G protein set forth in any one of SEQ ID NOs: 9266, 9274, 9285-9288, 9295, 9303, 9305-9037. In some embodiments, the mutant G protein is truncated and lacks up to 49 contiguous amino acids, such as up to 49, 48, 47, 46, 45, 44, 43, 42, 41, 40, 30, 38, 37, 36, 35, 34, 33, 32, 31, 30, 29, 28, 27, 26, 25, 24, 23, 22, 21, 20, 19, 18, 17, 16, 15, 14, 13, 12, 11, 10, 9, 8, 7, 6, 5, 4, 3, 2 or 1 contiguous amino acid(s) at the N-terminus of the wild-type G protein.

[0112] In some embodiments, the G protein is a wild-type Nipah virus G (NiV-G) protein or a wild-type Hendra virus G protein, or is a functionally active variant or biologically active portion thereof. In some embodiments, the G protein is a NiV-G protein that has the sequence set forth in SEQ ID NO: 9266, SEQ ID NO: 9285, or SEQ ID NO: 9295, or is a functional variant or a biologically active portion thereof that has an amino acid sequence having at least at or about 80%, at least at or about 81%, at least at or about 82%, at least at or about 83%, at least at or about 84%, at least at or about 85%, at least at or about 86%, at least at or about 87%, at least at or about 88%, at least at or about 89%, at least at or about 90%, at least at or about 91%, at least at or about 92%, at least at or about 93%, at least at or about 94%, at least at or about 95%, at least at or about 96%, at least at or about 97%, at least at or about 98%, or at least at or about 99% sequence identity to SEQ ID NO: 9266, SEQ ID NO: 9285, or SEQ ID NO: 9295.

[0113] In some embodiments, the G protein is a mutant NiV-G protein that is a biologically active portion of a wild-type NiV-G. In some embodiments, the biologically active portion is an N-terminally truncated fragment. In some embodiments, the mutant NiV-G protein is truncated and lacks up to 5 contiguous amino acid residues at or near the N-terminus of the wild-type NiV-G protein (SEQ ID NO: 9266, SEQ ID NO: 9285, or SEQ ID NO: 9295), up to 6 contiguous amino acid residues at or near the N-terminus of the wild-type NiV-G protein (SEQ ID NO: 9266, SEQ ID NO: 9285, or SEQ ID NO: 9295), up to 7 contiguous amino acid residues at or near the N-terminus of the wild-type NiV-G protein (SEQ ID NO: 9266, SEQ ID NO: 9285, or SEQ ID NO: 9295), up to 8 contiguous amino acid residues at or near the N-terminus of the wild-type NiV-G protein (SEQ ID NO: 9266, SEQ ID NO: 9285, or SEQ ID NO: 9295), up to 9 contiguous amino acid residues at or near the N-terminus of the wild-type NiV-G protein (SEQ ID NO: 9266, SEQ ID NO: 9285, or SEQ ID NO: 9295), up to 10 contiguous amino acid residues at or near the N-terminus of the wild-type NiV-G protein (SEQ ID NO: 9266, SEQ ID NO: 9285, or SEQ ID NO: 9295), up to 11 contiguous amino acid residues at or near the N-terminus of the wild-type NiV-G protein (SEQ ID NO: 9266, SEQ ID NO: 9285, or SEQ ID NO: 9295), up to 12 contiguous amino acid residues at or near the N-terminus of the wild-type NiV-G protein (SEQ ID NO: 9266, SEQ ID NO: 9285, or SEQ ID NO: 9295), up to 13 contiguous amino acid residues at or near the N-terminus of the wild-type NiV-G protein (SEQ ID NO: 9266, SEQ ID NO: 9285, or SEQ ID NO: 9295), up to 14 contiguous amino acid residues at or near the N-terminus of the wild-type NiV-G protein (SEQ ID NO:9266, SEQ ID NO:9285, or SEQ ID NO:9295), up to 15 contiguous amino acid residues at or near the N-terminus of the wild-type NiV-G protein (SEQ ID NO:9266, SEQ ID NO:9285, or SEQ ID NO:9295), up to 16 contiguous amino acid residues at or near the N-terminus of the wild-type NiV-G protein (SEQ ID NO:9266, SEQ ID NO:9285, or SEQ ID NO:9295), up to 17 contiguous amino acid residues at or near the N-terminus of the wild-type NiV-G protein (SEQ ID NO:9266, SEQ ID NO:9285, or SEQ ID NO:9295), up to 18 contiguous amino acid residues at or near the N-terminus of the wild-type NiV-G protein (SEQ ID NO:9266, SEQ ID NO:9285, or SEQ ID NO:9295), up to 19 contiguous amino acid residues at or near the N-terminus of the wild-type NiV-G protein (SEQ ID NO:9266, SEQ ID NO:9285, or SEQ ID NO:9295), up to 20 contiguous amino acid residues at or near the N-terminus of the wild-type NiV-G protein (SEQ ID NO:9266, SEQ ID NO:9285, or SEQ ID NO:9295), up to 21 contiguous amino acid residues at or near the N-terminus of the wild-type NiV-G protein (SEQ ID NO:9266, SEQ ID NO:9285, or SEQ ID NO:9295), up to 22 contiguous amino acid residues at or near the N-terminus of the wild-type NiV-G protein (SEQ ID NO:9266, SEQ ID NO:9285, or SEQ ID NO:9295), up to 23 contiguous amino acid residues at or near the N-terminus of the wild-type NiV-G protein (SEQ ID NO:9266, SEQ ID NO:9285, or SEQ ID NO:9295), up to 24 contiguous amino acid residues at or near the N-terminus of the wild-type NiV-G protein (SEQ ID NO:9266, SEQ ID NO:9285, or SEQ ID NO:9295), up to 25 contiguous amino acid residues at or near the N-terminus of the wild-type NiV-G protein (SEQ ID NO:9266, SEQ ID NO:9285, or SEQ ID NO:9295), up to 26 contiguous amino acid residues at or near the N-terminus of the wild-type NiV-G protein (SEQ ID NO:9266, SEQ ID NO:9285, or SEQ ID NO:9295), up to 27 contiguous amino acid residues at or near the N-terminus of the wild-type NiV-G protein (SEQ ID NO:9266, SEQ ID NO:9285, or SEQ ID NO:9295), up to 28 contiguous amino acid residues at or near the N-terminus of the wild-type NiV-G protein (SEQ ID NO:9266, SEQ ID NO:9285, or SEQ ID NO:9295), up to 29 contiguous amino acid residues at or near the N-terminus of the wild-type NiV-G protein (SEQ ID NO:9266, SEQ ID NO:9285, or SEQ ID NO:9295), up to 30 contiguous amino acid residues at or near the N-terminus of the wild-type NiV-G protein (SEQ ID NO:9266, SEQ ID NO:9285, or SEQ ID NO:9295), up to 31 contiguous amino acid residues at or near the N-terminus of the wild-type NiV-G protein (SEQ ID NO:9266, SEQ ID NO:9285, or SEQ ID NO:9295), up to 32 contiguous amino acid residues at or near the N-terminus of the wild-type NiV-G protein (SEQ ID NO:9266, SEQ ID NO:9285, or SEQ ID NO:9295), up to 33 contiguous amino acid residues at or near the N-terminus of the wild-type NiV-G protein (SEQ ID NO:9266, SEQ ID NO:9285, or SEQ ID NO:9295), up to 34 contiguous amino acid residues at or near the N-terminus of the wild-type NiV-G protein (SEQ ID NO:9266, SEQ ID NO:9285, or SEQ ID NO:9295), up to 35 contiguous amino acid residues at or near the N-terminus of the wild-type NiV-G protein (SEQ ID NO:9266, SEQ ID NO:9285, or SEQ ID NO:9295), up to 36 contiguous amino acid residues at or near the N-terminus of the wild-type NiV-G protein (SEQ ID NO:9266, SEQ ID NO:9285, or SEQ ID NO:9295), up to 37 contiguous amino acid residues at or near the N-terminus of the wild-type NiV-G protein (SEQ ID NO:9266, SEQ ID NO:9285, or SEQ ID NO:9295), up to 38 contiguous amino acid residues at or near the N-terminus of the wild-type NiV-G protein (SEQ ID NO:9266, SEQ ID NO:9285, or SEQ ID NO:9295), up to 39 contiguous amino acid residues at or near the N-terminus of the wild-type NiV-G protein (SEQ ID NO:9266, SEQ ID NO:9285, or SEQ ID NO:9295), up to 40 contiguous amino acid residues at or near the N-terminus of the wild-type NiV-G protein (SEQ ID NO:9266, SEQ ID NO:9285, or SEQ ID NO:9295), up to 41 contiguous amino acid residues at or near the N-terminus of the wild-type NiV-G protein (SEQ ID NO:9266, SEQ ID NO:9285, or SEQ ID NO:9295), up to 42 contiguous amino acid residues at or near the N-terminus of the wild-type NiV-G protein (SEQ ID NO:9266, SEQ ID NO:9285, or SEQ ID NO:9295), up to 43 contiguous amino acid residues at or near the N-terminus of the wild-type NiV-G protein (SEQ ID NO:9266, SEQ ID NO:9285, or SEQ ID NO:9295), up to 44 contiguous amino acid residues at or near the N-terminus of the wild-type NiV-G protein (SEQ ID NO:9266, SEQ ID NO: 618, or SEQ ID NO: 628), or up to 45 contiguous amino acid residues at or near the N-terminus of the wild-type NiV-G protein (SEQ ID NO:9266, SEQ ID NO:9285, or SEQ ID NO:9295).

[0114] In some embodiments, the NiV-G protein is a biologically active portion that does not contain a cytoplasmic domain. In some embodiments, the NiV-G protein without the cytoplasmic domain is encoded by SEQ ID NO:9289.

[0115] In some embodiments, the mutant NiV-G protein comprises a sequence set forth in any of SEQ ID NOs: 601-606, 629-634, 612, 622, or 637, or is a functional variant thereof that has an amino acid sequence having at least at or about 80%, at least at or about 81%, at least at or about 82%, at least at or about 83%, at least at or about 84%, at least at or about 85%, at least at or about 86%, or at least at or about 87%, at least at or about 88%, or at least at or about 89%, at least at or about 90%, at least at or about 91%, at least at or about 92%, at least at or about 93%, at least at or about 94%, at least at or about 95%, at least at or about 96%, at least at or about 97%, at least at or about 98%, or at least at or about 99% sequence identity to SEQ ID NOs: 9267-9269, 9296-9301, 9277, 9289, 9304.

[0116] In some embodiments, the mutant NiV-G protein has a 5 amino acid truncation at or near the N-terminus of the wild-type NiV-G protein (SEQ ID NO:9266, SEQ ID NO: 9285, or SEQ ID NO:9295), such as set forth in SEQ ID NO:9267 or a functional variant thereof having at least at or about 80%, at least at or about 81%, at least at or about 82%, at least at or about 83%, at least at or about 84%, at least at or about 85%, at least at or about 86%, at least at or about 87%, at least at or about 88%, at least at or about 89%, at least at or about 90%, at least at or about 91%, at least at or about 92%, at least at or about 93%, at least at or about 94%, at least at or about 95%, at least at or about 96%, at least at or about 97%, at least at or about 98%, or at least at or about 99% sequence identity to SEQ ID NO:9267, or as set forth in SEQ ID NO:9296 or a functional variant thereof having at least at or about 80%, at least at or about 81%, at least at or about 82%, at least at or about 83%, at least at or about 84%, at least at or about 85%, at least at or about 86%, at least at or about 87%, at least at or about 88%, at least at or about 89%, at least at or about 90%, at least at or about 91%, at least at or about 92%, at least at or about 93%, at least at or about 94%, at least at or about 95%, at least at or about 96%, at least at or about 97%, at least at or about 98%, or at least at or about 99% sequence identity to SEQ ID NO: 9296 or a functional variant thereof having at least at or about 80%, at least at or about 81%, at least at or about 82%, at least at or about 83%, at least at or about 84%, at least at or about 85%, at least at or about 86%, at least at or about 87%, at least at or about 88%, at least at or about 89%, at least at or about 90%, at least at or about 91%, at least at or about 92%, at least at or about 93%, at least at or about 94%, at least at or about 95%, at least at or about 96%, at least at or about 97%, at least at or about 98%, or at least at or about 99% sequence identity to SEQ ID NO: 9296.

[0117] In some embodiments, the mutant NiV-G protein has a 10 amino acid truncation at or near the N-terminus of the wild-type NiV-G protein (SEQ ID NO:9266, SEQ ID NO: 9285, or SEQ ID NO:9295), such as set forth in SEQ ID NO:9268 or a functional variant thereof having at least at or about 80%, at least at or about 81%, at least at or about 82%, at least at or about 83%, at least at or about 84%, at least at or about 85%, at least at or about 86%, at least at or about 87%, at least at or about 88%, at least at or about 89%, at least at or about 90%, at least at or about 91%, at least at or about 92%, at least at or about 93%, at least at or about 94%, at least at or about 95%, at least at or about 96%, at least at or about 97%, at least at or about 98%, or at least at or about 99% sequence identity to SEQ ID NO:9268, or such as set forth in SEQ ID NO:9297 or a functional variant thereof having at least at or about 80%, at least at or about 81%, at least at or about 82%, at least at or about 83%, at least at or about 84%, at least at or about 85%, at least at or about 86%, at least at or about 87%, at least at or about 88%, at least at or about 89%, at least at or about 90%, at least at or about 91%, at least at or about 92%, at least at or about 93%, at least at or about 94%, at least at or about 95%, at or about 96%, at least at or about 97%, at least at or about 98%, or at least at or about 99% sequence identity to SEQ ID NO: 9297.

[0118] In some embodiments, the mutant NiV-G protein has a 15 amino acid truncation at or near the N-terminus of the wild-type NiV-G protein (SEQ ID NO:9266, SEQ ID NO: 9285, or SEQ ID NO:9295), such as set forth in SEQ ID NO:9269 or a functional variant thereof that has an amino acid sequence having at least at or about 80%, at least at or about 81%, at least at or about 82%, at least at or about 83%, at least at or about 84%, at least at or about 85%, at least at or about 86%, at least at or about 87%, at least at or about 88%, at least at or about 89%, at least at or about 90%, at least at or about 91%, at least at or about 92%, at least at or about 93%, at least at or about 94%, at least at or about 95%, at least at or about 96%, at least at or about 97%, at least at or about 98%, or at least at or about 99% sequence identity to SEQ ID NO: 9269, or such as set forth in SEQ ID NO:9298 or a functional variant thereof having at least at or about 80%, at least at or about 81%, at least at or about 82%, at least at or about 83%, at least at or about 84%, at least at or about 85%, at least at or about 86%, at least at or about 87%, at least at or about 88%, at least at or about 89%, at least at or about 90%, at least at or about 91%, at least at or about 92%, at least at or about 93%, at least at or about 94%, at least at or about 95%, at least at or about 96%, at least at or about 97%, at least at or about 98%, or at least at or about 99% sequence identity to SEQ ID NO:9298.

[0119] In some embodiments, the mutant NiV-G protein has a 20 amino acid truncation at or near the N-terminus of the wild-type NiV-G protein (SEQ ID NO:9266, SEQ ID NO: 9285, or SEQ ID NO:9295) such as set forth in SEQ ID NO:9270, or a functional variant thereof having at least at or about 80%, at least at or about 81%, at least at or about 82%, at least at or about 83%, at least at or about 84%, at least at or about 85%, at least at or about 86%, at least at or about 87%, at least at or about 88%, at least at or about 89%, at least at or about 90%, at least at or about 91%, at least at or about 92%, at least at or about 93%, at least at or about 94%, at least at or about 95%, at least or about 96%, at least at or about 97%, at least at or about 98%, or at least at or about 99% sequence identity to SEQ ID NO:9270, or such as set forth in SEQ ID NO:9299 or a functional variant thereof having at least at or about 80%, at least at or about 81%, at least at or about 82%, at least at or about 83%, at least or about 84%, at least at or about 85%, at least at or about 86%, at least at or about 87%, at least at or about 88%, at least at or about 89%, at least at or about 90%, at least at or about 91%, at least at or about 92%, at least at or about 93%, at least at or about 94%, at least at or about 95%, at least at or about 96%, at least at or about 97%, at least at or about 98%, or at least at or about 99% sequence identity to SEQ ID NO: 9299.

[0120] In some embodiments, the mutant NiV-G protein has a 25 amino acid truncation at or near the N-terminus of the wild-type NiV-G protein (SEQ ID NO:9266, SEQ ID NO: 9285, or SEQ ID NO:9295), such as set forth in SEQ ID NO:9271 or a functional variant thereof having at least at or about 80%, at least at or about 81%, at least at or about 82%, at least at or about 83%, at least at or about 84%, at least at or about 85%, at least at or about 86%, at least at or about 87%, at least at or about 88%, at least at or about 89%, at least at or about 90%, at least at or about 91%, at least at or about 92%, at least at or about 93%, at least at or about 94%, at least at or about 95%, at least or about 96%, at least at or about 97%, at least at or about 98%, or at least at or about 99% sequence identity to SEQ ID NO:9271, or such as set forth in SEQ ID NO:9300 or a functional variant thereof having at least at or about 80%, at least at or about 81%, at least at or about 82%, at least at or about 83%, at least at or about 84%, at least at or about 85%, at least at or about 86%, at least at or about 87%, at least at or about 88%, at least at or about 89%, at least at or about 90%, at least at or about 91%, at least at or about 92%, at least at or about 93%, at least at or about 94%, at least at or about 95%, at least at or about 96%, at least at or about 97%, at least at or about 98%, or at least at or about 99% sequence identity to SEQ ID NO: 9300.

[0121] In some embodiments, the mutant NiV-G protein has a 30 amino acid truncation at or near the N-terminus of the wild-type NiV-G protein (SEQ ID NO:9266, SEQ ID NO: 9285, or SEQ ID NO:9295), such as set forth in SEQ ID NO:9273 or a functional variant thereof having at least at or about 80%, at least at or about 81%, at least at or about 82%, at least at or about 83%, at least at or about 84%, at least at or about 85%, at least at or about 86%, at least at or about 87%, at least at or about 88%, at least at or about 89%, at least at or about 90%, at least at or about 91%, at least at or about 92%, at least at or about 93%, at least at or about 94%, at least at or about 95%, at least at or about 96%, at least at or about 97%, at least at or about 98%, or at least at or about 99% sequence identity to SEQ ID NO:9273, or such as set forth in SEQ ID NO:9301 or a functional variant thereof having at least at or about 80%, at least at or about 81%, at least at or about 82%, at least at or about 83%, at least at or about 84%, at least at or about 85%, at least at or about 86%, at least at or about 87%, at least at or about 88%, at least at or about 89%, at least at or about 90%, at least at or about 91%, at least at or about 92%, at least at or about 93%, at least at or about 94%, at least at or about 95%, at least at or about 96%, at least at or about 97%, at least at or about 98%, or at least at or about 99% sequence identity to SEQ ID NO: 9301.

[0122] In some embodiments, the mutant NiV-G protein has a 33 amino acid truncation at or near the N-terminus of the wild-type NiV-G protein (SEQ ID NO:9266, SEQ ID NO: 9285, or SEQ ID NO:9295) or a functional variant thereof having at least at or about 80%, at least at or about 81%, at least at or about 82%, at least at or about 83%, at least at or about 84%, at least at or about 85%, at least at or about 86%, at least at or about 87%, at least at or about 88%, at least at or about 89%, at least at or about 90%, at least at or about 91%, at least at or about 92%, at least at or about 93%, at least at or about 94%, at least at or about 95%, at least at or about 96%, at least at or about 97%, at least at or about 98%, or at least at or about 99% sequence identity to SEQ ID NO:9277, or such as set forth in SEQ ID NO:9302 or a functional variant thereof having at least at or about 80%, at least at or about 81%, at least at or about 82%, at least at or about 83%, at least at or about 84%, at least at or about 85%, at least at or about 86%, at least at or about 87%, at least at or about 88%, at least at or about 89%, at least at or about 90%, at least at or about 91%, at least at or about 92%, at least at or about 93%, at least at or about 94%, at least at or about 95%, at least at or about 96%, at least at or about 97%, at least at or about 98%, or at least at or about 99% sequence identity to SEQ ID NO:9302.

[0123] In some embodiments, the mutant NiV-G protein has a 34 amino acid truncation at or near the N-terminus of the wild-type NiV-G protein (SEQ ID NO:9266, SEQ ID NO: 9285, or SEQ ID NO:9295), such as set forth in SEQ ID NO:9277 or a functional variant thereof having at least at or about 80%, at least at or about 81%, at least at or about 82%, at least at or about 83%, at least at or about 84%, at least at or about 85%, at least at or about 86%, at least at or about 87%, at least at or about 88%, at least at or about 89%, at least at or about 90%, at least at or about 91%, at least at or about 92%, at least at or about 93%, at least at or about 94%, at least at or about 95%, at least at or about 96%, at least at or about 97%, at least at or about 98%, or at least at or about 99% sequence identity to SEQ ID NO:9277, or such as set forth in SEQ ID NO:9302 or a functional variant thereof having at least at or about 80%, at least at or about 81%, at least at or about 82%, at least at or about 83%, at least at or about 84%, at least at or about 85%, at least at or about 86%, at least at or about 87%, at least at or about 88%, at least at or about 89%, at least at or about 90%, at least at or about 91%, at least at or about 92%, at least at or about 93%, at least at or about 94%, at least at or about 95%, at least at or about 96%, at least at or about 97%, at least at or about 98%, or at least at or about 99% sequence identity to SEQ ID NO: 9302.

[0124] In a preferred embodiment, the NiV-G protein has a 34 amino acid truncation at or near the N-terminus of the wild-type NiV-G protein (SEQ ID NO:9266, SEQ ID NO: 9285, or SEQ ID NO:9295) and one or more amino acid substitutions corresponding to amino acid substitutions selected from E501A, W504A, Q530A, and E533A with reference to the numbering set forth in SEQ ID NO:9285.

[0125] In some embodiments, the mutant NiV-G protein lacks the N-terminal cytoplasmic domain of the wild-type NiV-G protein (SEQ ID NO:9266, SEQ ID NO:9285, or SEQ ID NO: 9295), such as set forth in SEQ ID NO:9289 or a functional variant thereof having at least at or about 80%, at least at or about 81%, at least at or about 82%, at least at or about 83%, at least at or about 84%, at least at or about 85%, at least at or about 86%, at least at or about 87%, at least at or about 88%, at least at or about 89%, at least at or about 90%, at least at or about 91%, at least at or about 92%, at least at or about 93%, at least at or about 94%, at least at or about 95%, at least at or about 96%, at least at or about 97%, at least at or about 98%, or at least at or about 99% sequence identity to SEQ ID NO:9289.

[0126] In some embodiments, the mutant G protein is a mutant HeV-G protein that has the sequence set forth in SEQ ID NO:9275 or 9303, or is a functional variant or biologically active portion thereof that has an amino acid sequence having at least at or about 80%, at least at or about 81%, at least at or about 82%, at least at or about 83%, at least at or about 84%, at least at or about 85%, at least at or about 86%, at least at or about 87%, at least at or about 88%, at least at or about 89%, at least at or about 90%, at least at or about 91%, at least at or about 92%, at least at or about 93%, at least at or about 94%, at least at or about 95%, at least or about 96%, at least at or about 97%, at least at or about 98%, or at least at or about 99% sequence identity to SEQ ID NO:9275 or 9303.

[0127] In some embodiments, the G protein is a mutant HeV-G protein that is a biologically active portion of a wild-type HeV-G. In some embodiments, the biologically active portion is an N-terminally truncated fragment. In some embodiments, the mutant HeV-G protein is truncated and lacks up to 5 contiguous amino acid residues at or near the N-terminus of the wild-type HeV-G protein (SEQ ID NO:9275 or 9303), up to 6 contiguous amino acid residues at or near the N-terminus of the wild-type HeV-G protein (SEQ ID NO:9275 or 9303), up to 7 contiguous amino acid residues at or near the N-terminus of the wild-type HeV-G protein (SEQ ID NO:9275 or 9303), up to 8 contiguous amino acid residues at or near the N-terminus of the wild-type HeV-G protein (SEQ ID NO:9275 or 9303), up to 9 contiguous amino acid residues at or near the N-terminus of the wild-type HeV-G protein (SEQ ID NO:9275 or 9303), up to 10 contiguous amino acid residues at or near the N-terminus of the wild-type HeV-G protein (SEQ ID NO:9275 or 9303), up to 11 contiguous amino acid residues at or near the N-terminus of the wild-type HeV-G protein (SEQ ID NO:9275 or 9303), up to 12 contiguous amino acid residues at or near the N-terminus of the wild-type HeV-G protein (SEQ ID NO:9275 or 9303), up to 13 contiguous amino acid residues at or near the N-terminus of the wild-type HeV-G protein (SEQ ID NO:9275 or 9303), up to 14 contiguous amino acid residues at or near the N-terminus of the wild-type HeV-G protein (SEQ ID NO:9275 or 9303), up to 15 contiguous amino acid residues at or near the N-terminus of the wild-type HeV-G protein (SEQ ID NO:9275 or 9303), up to 16 contiguous amino acid residues at or near the N-terminus of the wild-type HeV-G protein (SEQ ID NO:9275 or 9303), up to 17 contiguous amino acid residues at or near the N-terminus of the wild-type HeV-G protein (SEQ ID NO:9275 or 9303), up to 18 contiguous amino acid residues at or near the N-terminus of the wild-type HeV-G protein (SEQ ID NO:9275 or 9303), up to 19 contiguous amino acid residues at or near the N-terminus of the wild-type HeV-G protein (SEQ ID NO:9275 or 9303), up to 20 contiguous amino acid residues at or near the N-terminus of the wild-type HeV-G protein (SEQ ID NO:9275 or 9303), up to 21 contiguous amino acid residues at or near the N-terminus of the wild-type HeV-G protein (SEQ ID NO:9275 or 9303), up to 22 contiguous amino acid residues at or near the N-terminus of the wild-type HeV-G protein (SEQ ID NO:9275 or 9303), up to 23 contiguous amino acid residues at or near the N-terminus of the wild-type HeV-G protein (SEQ ID NO:9275 or 9303), up to 24 contiguous amino acid residues at or near the N-terminus of the wild-type HeV-G protein (SEQ ID NO:9275 or 9303), up to 25 contiguous amino acid residues at or near the N-terminus of the wild-type HeV-G protein (SEQ ID NO:9275 or 9303), up to 26 contiguous amino acid residues at or near the N-terminus of the wild-type HeV-G protein (SEQ ID NO:9275 or 9303), up to 27 contiguous amino acid residues at or near the N-terminus of the wild-type HeV-G protein (SEQ ID NO:9275 or 9303), up to 28 contiguous amino acid residues at or near the N-terminus of the wild-type HeV-G protein (SEQ ID NO:9275 or 9303), up to 29 contiguous amino acid residues at or near the N-terminus of the wild-type HeV-G protein (SEQ ID NO:9275 or 9303), up to 30 contiguous amino acid residues at or near the N-terminus of the wild-type HeV-G protein (SEQ ID NO:9275 or 9303), up to 31 contiguous amino acid residues at or near the N-terminus of the wild-type HeV-G protein (SEQ ID NO:9275 or 9303), up to 32 contiguous amino acid residues at or near the N-terminus of the wild-type HeV-G protein (SEQ ID NO:9275 or 9303), up to 33 contiguous amino acid residues at or near the N-terminus of the wild-type HeV-G protein (SEQ ID NO:9275 or 9303), up to 34 contiguous amino acid residues at or near the N-terminus of the wild-type HeV-G protein (SEQ ID NO:9275 or 9303), up to 35 contiguous amino acid residues at or near the N-terminus of the wild-type HeV-G protein (SEQ ID NO:9275 or 9303), up to 36 contiguous amino acid residues at or near the N-terminus of the wild-type HeV-G protein (SEQ ID NO:9275 or 9303), up to 37 contiguous amino acid residues at or near the N-terminus of the wild-type HeV-G protein (SEQ ID NO:9275 or 9303), up to 38 contiguous amino acid residues at or near the N-terminus of the wild-type HeV-G protein (SEQ ID NO:9275 or 9303), up to 39 contiguous amino acid residues at or near the N-terminus of the wild-type HeV-G protein (SEQ ID NO:9275 or 9303), up to 40 contiguous amino acid residues at or near the N-terminus of the wild-type HeV-G protein (SEQ ID NO:9275 or 9303), up to 41 contiguous amino acid residues at or near the N-terminus of the wild-type HeV-G protein (SEQ ID NO:9275 or 9303), up to 42 contiguous amino acid residues at or near the N-terminus of the wild-type HeV-G protein (SEQ ID NO:9275 or 9303), up to 43 contiguous amino acid residues at or near the N-terminus of the wild-type HeV-G protein (SEQ ID NO:9275 or 9303), up to 44 contiguous amino acid residues at or near the N-terminus of the wild-type HeV-G protein (SEQ ID NO:9275 or 9303), or up to 45 contiguous amino acid residues at or near the N-terminus of the wild-type HeV-G protein (SEQ ID NO:9275 or 9303).

[0128] In some embodiments, the HeV-G protein is a biologically active portion that does not contain a cytoplasmic domain. In some embodiments, the mutant HeV-G protein lacks the N-terminal cytoplasmic domain of the wild-type HeV-G protein (SEQ ID NO: 9275 or 9303), such as set forth in SEQ ID NO:9303 or a functional variant thereof having at least at or about 80%, at least at or about 81%, at least at or about 82%, at least at or about 83%, at least at or about 84%, at least at or about 85%, at least at or about 86%, at least at or about 87%, at least at or about 88%, at least at or about 89%, at least at or about 90%, at least at or about 91%, at least at or about 92%, at least at or about 93%, at least at or about 94%, at least at or about 95%, at least at or about 96%, at least at or about 97%, at least at or about 98%, or at least at or about 99% sequence identity to SEQ ID NO:9303.

[0129] In some embodiments, the G protein or the functionally active variant or biologically active portion thereof binds to Ephrin B2 or Ephrin B3. In some aspects, the G protein has the sequence of amino acids set forth in any one of SEQ ID NO:9266, SEQ ID NO:9275, SEQ ID NO:9285, SEQ ID NO:9286, SEQ ID NO:9295, SEQ ID NO: 9287, or SEQ ID NO:9288, or is a functionally active variant thereof or a biologically active portion thereof that is able to bind to Ephrin B2 or Ephrin B3. In some embodiments, the functionally active variant or biologically active portion has an amino acid sequence having at least at or about 80%, at least at or about 85%, at least at or about 90%, at least at or about 91%, at least at or about 92%, at least at or about 93%, at least at or about 94%, at least at or about 95%, at least at or about 96%, at least at or about 97%, at least at or about 98%, or at least at or about 99% sequence identity to SEQ ID NO:9266, SEQ ID NO:9275, SEQ ID NO:9285, SEQ ID NO: 9286, SEQ ID NO:9295, SEQ ID NO:9287, or SEQ ID NO:9288, or a functionally active variant or biologically active portion thereof, and retains binding to Ephrhin B2 or B3.

[0130] Reference to retaining binding to Ephrin B2 or B3 includes binding that is at least or at least about 5% of the level or degree of binding of the corresponding wild-type G protein, such as set forth in SEQ ID NO:9266, SEQ ID NO:9275, SEQ ID NO:9285, SEQ ID NO:9286, SEQ ID NO:9295, SEQ ID NO:9287, or SEQ ID NO:9288, or a functionally active variant or biologically active portion thereof, 10% of the level or degree of binding of the corresponding wild-type G protein, such as set forth in SEQ ID NO: 9266, SEQ ID NO:9275, SEQ ID NO:9285, SEQ ID NO:9286, SEQ ID NO: 9295, SEQ ID NO: 9287, or SEQ ID NO:9288, or a functionally active variant or biologically active portion thereof, 15% of the level or degree of binding of the corresponding wild-type G protein, such as set forth in SEQ ID NO:9266, SEQ ID NO: 9275, SEQ ID NO:9285, SEQ ID NO:9286, SEQ ID NO:9295, SEQ ID NO:9287, or SEQ ID NO:9288, or a functionally active variant or biologically active portion thereof, 20% of the level or degree of binding of the corresponding wild-type G protein, such as set forth in SEQ ID NO:9266, SEQ ID NO:9275, SEQ ID NO:9285, SEQ ID NO:9286, SEQ ID NO:9295, SEQ ID NO:9287, or SEQ ID NO:9288, or a functionally active variant or biologically active portion thereof, 25% of the level or degree of binding of the corresponding wild-type G protein, such as set forth in SEQ ID NO: 9266, SEQ ID NO:9275, SEQ ID NO:9285, SEQ ID NO:9286, SEQ ID NO: 9295, SEQ ID NO: 9287, or SEQ ID NO:9288, or a functionally active variant or biologically active portion, 30% of the level or degree of binding of the corresponding wild-type G protein, such as set forth in SEQ ID NO:9266, SEQ ID NO:9275, SEQ ID NO: 9285, SEQ ID NO:9286, SEQ ID NO:9295, SEQ ID NO:9287, or SEQ ID NO: 9288, or a functionally active variant or biologically active portion thereof, 35% of the level or degree of binding of the corresponding wild-type G protein, such as set forth in SEQ ID NO:9266, SEQ ID NO:9275, SEQ ID NO:9285, SEQ ID NO:9286, SEQ ID NO:9295, SEQ ID NO:9287, or SEQ ID NO:9288, or a functionally active variant or biologically active portion thereof, 40% of the level or degree of binding of the corresponding wild-type G protein, such as set forth in SEQ ID NO:9266, SEQ ID NO: 9275, SEQ ID NO:9285, SEQ ID NO:9286, SEQ ID NO:9295, SEQ ID NO:9287, or SEQ ID NO:9288, or a functionally active variant or biologically active portion thereof, 45% of the level or degree of binding of the corresponding wild-type G protein, such as set forth in SEQ ID NO:9266, SEQ ID NO:9275, SEQ ID NO:9285, SEQ ID NO:9286, SEQ ID NO:9295, SEQ ID NO:9287, or SEQ ID NO:9288, or a functionally active variant or biologically active portion thereof, 50% of the level or degree of binding of the corresponding wild-type G protein, such as set forth in SEQ ID NO: 9266, SEQ ID NO:9275, SEQ ID NO:9285, SEQ ID NO:9286, SEQ ID NO: 9295, SEQ ID NO: 9287, or SEQ ID NO:9288, or a functionally active variant or biologically active portion thereof, 55% of the level or degree of binding of the corresponding wild-type G protein, such as set forth in SEQ ID NO:9266, SEQ ID NO: 9275, SEQ ID NO: 9285, SEQ ID NO:9286, SEQ ID NO:9295, SEQ ID NO:9287, or SEQ ID NO:9288, or a functionally active variant or biologically active portion thereof, 60% of the level or degree of binding of the corresponding wild-type G protein, such as set forth in SEQ ID NO:9266, SEQ ID NO:9275, SEQ ID NO:9285, SEQ ID NO:9286, SEQ ID NO:9295, SEQ ID NO:9287, or SEQ ID NO:9288, or a functionally active variant or biologically active portion thereof, 65% of the level or degree of binding of the corresponding wild-type G protein, such as set forth in SEQ ID NO: 9266, SEQ ID NO:9275, SEQ ID NO:9285, SEQ ID NO:9286, SEQ ID NO: 9295, SEQ ID NO: 9287, or SEQ ID NO: 9288, or a functionally active variant or biologically active portion thereof, 70% of the level or degree of binding of the corresponding wild-type G protein, such as set forth in SEQ ID NO:9266, SEQ ID NO: 9275, SEQ ID NO: 9285, SEQ ID NO:9286, SEQ ID NO:9295, SEQ ID NO:9287, or SEQ ID NO:9288, or a functionally active variant or biologically active portion thereof, such as at least or at least about 75% of the level or degree of binding of the corresponding wild-type G protein, such as set forth in SEQ ID NO:9266, SEQ ID NO: 9275, SEQ ID NO: 9285, SEQ ID NO:9286, SEQ ID NO:9295, SEQ ID NO:9287, or SEQ ID NO:9288, or a functionally active variant or biologically active portion thereof, such as at least or at least about 80% of the level or degree of binding of the corresponding wild-type G protein, such as set forth in SEQ ID NO:9266, SEQ ID NO: 9275, SEQ ID NO:9285, SEQ ID NO:9286, SEQ ID NO:9295, SEQ ID NO:9287, or SEQ ID NO:9288, or a functionally active variant or biologically active portion thereof, such as at least or at least about 85% of the level or degree of binding of the corresponding wild-type G protein, such as set forth in SEQ ID NO:9266, SEQ ID NO: 9275, SEQ ID NO:9285, SEQ ID NO:9286, SEQ ID NO:9295, SEQ ID NO:9287, or SEQ ID NO:9288, or a functionally active variant or biologically active portion thereof, such as at least or at least about 90% of the level or degree of binding of the corresponding wild-type G protein, such as set forth in SEQ ID NO:9266, SEQ ID NO: 9275, SEQ ID NO: 9285, SEQ ID NO:9286, SEQ ID NO:9295, SEQ ID NO:9287, or SEQ ID NO:9288, or a functionally active variant or biologically active portion thereof, or such as at least or at least about 95% of the level or degree of binding of the corresponding wild-type protein, such as set forth in SEQ ID NO:9266, SEQ ID NO: 9275, SEQ ID NO:9285, SEQ ID NO:9286, SEQ ID NO:9295, SEQ ID NO:9287, or SEQ ID NO:9288, or a functionally active variant or biologically active portion thereof. In some embodiments, the G protein is NiV-G or a functionally active variant or biologically active portion thereof and binds to Ephrin B2 or Ephrin B3.

[0131] In some aspects, the NiV-G has the sequence of amino acids set forth in SEQ ID NO: 9266, SEQ ID NO:9285, or SEQ ID NO:9295, or is a functionally active variant thereof or a biologically active portion thereof that is able to bind to Ephrin B2 or Ephrin B3. In some embodiments, the functionally active variant or biologically active portion has an amino acid sequence having at least at or about 80%, at least at or about 85%, at least at or about 90%, at least at or about 91%, at least at or about 92%, at least at or about 93%, at least at or about 94%, at least at or about 95%, at least at or about 96%, at least at or about 97%, at least at or about 98%, or at least at or about 99% sequence identity to SEQ ID NO:9266, SEQ ID NO:9285, or SEQ ID NO: 9295 and retains binding to Eprhin B2 or B3. Exemplary biologically active portions include N-terminally truncated variants lacking all or a portion of the cytoplasmic domain, e.g. 1 or more, such as 1 to 49 contiguous N-terminal amino acid residues, e.g. set forth in any one of SEQ ID NOS: 9267-9272, 9289, and 9296-9301.

[0132] Reference to retaining binding to Ephrin B2 or B3 includes binding that is at least or at least about 5% of the level or degree of binding of the corresponding wild-type NiV-G, such as set forth in SEQ ID NO:9266, SEQ ID NO:9285, or SEQ ID NO:9295, 10% of the level or degree of binding of the corresponding wild-type NiV-G, such as set forth in SEQ ID NO:9266, SEQ ID NO:9285, or SEQ ID NO:9295, 15% of the level or degree of binding of the corresponding wild-type NiV-G, such as set forth in SEQ ID NO:9266, SEQ ID NO:9285, or SEQ ID NO:9295, 20% of the level or degree of binding of the corresponding wild-type NiV-G, such as set forth in SEQ ID NO: 9266, SEQ ID NO:9285, or SEQ ID NO:92954, 25% of the level or degree of binding of the corresponding wild-type NiV-G, such as set forth in SEQ ID NO:9266, SEQ ID NO:9285, or SEQ ID NO:9295, 30% of the level or degree of binding of the corresponding wild-type NiV-G, such as set forth in S SEQ ID NO:9266, SEQ ID NO: 9285, or SEQ ID NO:9295, 35% of the level or degree of binding of the corresponding wild-type NiV-G, such as set forth in SEQ ID NO:9266, SEQ ID NO: 9285, or SEQ ID NO: 9295, 40% of the level or degree of binding of the corresponding wild-type NiV-G, such as set forth in SEQ ID NO:9266, SEQ ID NO: 9285, or SEQ ID NO: 9295, 45% of the level or degree of binding of the corresponding wild-type NiV-G, such as set forth in SEQ ID NO:9266, SEQ ID NO: 9285, or SEQ ID NO:9295, 50% of the level or degree of binding of the corresponding wild-type NiV-G, such as set forth in SEQ ID NO:9266, SEQ ID NO: 9285, or SEQ ID NO:9295, 55% of the level or degree of binding of the corresponding wild-type NiV-G, such as set forth in SEQ ID NO:9266, SEQ ID NO: 9285, or SEQ ID NO:9295, 60% of the level or degree of binding of the corresponding wild-type NiV-G, such as set forth in SEQ ID NO:9266, SEQ ID NO: 9285, or SEQ ID NO:9295, 65% of the level or degree of binding of the corresponding wild-type NiV-G, such as set forth in SEQ ID NO:9266, SEQ ID NO: 9285, or SEQ ID NO:9295, 70% of the level or degree of binding of the corresponding wild-type NiV-G, such as set forth in SEQ ID NO:9266, SEQ ID NO: 9285, or SEQ ID NO:9295, such as at least or at least about 75% of the level or degree of binding of the corresponding wild-type NiV-G, such as set forth in SEQ ID NO: 9266, SEQ ID NO:9285, or SEQ ID NO:9295, such as at least or at least about 80% of the level or degree of binding of the corresponding wild-type NIV-G, such as set forth in SEQ ID NO:9266, SEQ ID NO:9285, or SEQ ID NO:9295, such as at least or at least about 85% of the level or degree of binding of the corresponding wild-type NiV-G, such as set forth in SEQ ID NO:9266, SEQ ID NO:9285, or SEQ ID NO: 9295, such as at least or at least about 90% of the level or degree of binding of the corresponding wild-type NiV-G, such as set forth in SEQ ID NO:9266, SEQ ID NO: 9285, or SEQ ID NO:9295, or such as at least or at least about 95% of the level or degree of binding of the corresponding wild-type NiV-G, such as set forth in SEQ ID NO: 9266, SEQ ID NO:9285, or SEQ ID NO:9295.

[0133] In some embodiments, the G protein is HeV-G or a functionally active variant or biologically active portion thereof and binds to Ephrin B2 or Ephrin B3. In some aspects, the HeV-G has the sequence of amino acids set forth in SEQ ID NO:9275 or 9303, or is a functionally active variant thereof or a biologically active portion thereof that is able to bind to Ephrin B2 or Ephrin B3. In some embodiments, the functionally active variant or biologically active portion has an amino acid sequence having at least at or about 80%, at least at or about 85%, at least at or about 90%, at least at or about 91%, at least at or about 92%, at least at or about 93%, at least at or about 94%, at least at or about 95%, at least at or about 96%, at least at or about 97%, at least at or about 98%, or at least at or about 99% sequence identity to SEQ ID NO: 9275 or 9303 and retains binding to Eprhin B2 or B3. Exemplary biologically active portions include N-terminally truncated variants lacking all or a portion of the cytoplasmic domain, e.g. 1 or more, such as 1 to 49 contiguous N-terminal amino acid residues, e.g. set forth in any one of SEQ ID NO:9290.

[0134] Reference to retaining binding to Ephrin B2 or B3 includes binding that is at least or at least about 5% of the level or degree of binding of the corresponding wild-type HeV-G, such as set forth in SEQ ID NO:9275 or 9303, 10% of the level or degree of binding of the corresponding wild-type HeV-G, such as set forth in SEQ ID NO:9275 or 9303, 15% of the level or degree of binding of the corresponding wild-type HeV-G, such as set forth in SEQ ID NO:9275 or 9303, 20% of the level or degree of binding of the corresponding wild-type HeV-G, such as set forth in SEQ ID NO:9275 or 9303, 25% of the level or degree of binding of the corresponding wild-type HeV-G, such as set forth in SEQ ID NO:9275 or 9303, 30% of the level or degree of binding of the corresponding wild-type HeV-G, such as set forth in SEQ ID NO:9275 or 9303, 35% of the level or degree of binding of the corresponding wild-type HeV-G, such as set forth in SEQ ID NO:9275 or 9303, 40% of the level or degree of binding of the corresponding wild-type HeV-G, such as set forth in SEQ ID NO:9275 or 9303, 45% of the level or degree of binding of the corresponding wild-type HeV-G, such as set forth in SEQ ID NO:9275 or 9303, 50% of the level or degree of binding of the corresponding wild-type HeV-G, such as set forth in SEQ ID NO:9275 or 9303, 55% of the level or degree of binding of the corresponding wild-type HeV-G, such as set forth in SEQ ID NO:9275 or 9303, 60% of the level or degree of binding of the corresponding wild-type HeV-G, such as set forth in SEQ ID NO:9275 or 9303, 65% of the level or degree of binding of the corresponding wild-type HeV-G, such as set forth in SEQ ID NO:9275 or 9303, 70% of the level or degree of binding of the corresponding wild-type HeV-G, such as set forth in SEQ ID NO:9275 or 9303, such as at least or at least about 75% of the level or degree of binding of the corresponding wild-type HeV-G, such as set forth in SEQ ID NO:9275 or 9303, such as at least or at least about 80% of the level or degree of binding of the corresponding wild-type NIV-G, such as set forth in SEQ ID NO:9275 or 9303, such as at least or at least about 85% of the level or degree of binding of the corresponding wild-type HeV-G, such as set forth in SEQ ID NO:9275 or 9303, such as at least or at least about 90% of the level or degree of binding of the corresponding wild-type HeV-G, such as set forth in SEQ ID NO:9275 or 9303, or such as at least or at least about 95% of the level or degree of binding of the corresponding wild-type HeV-G, such as set forth in SEQ ID NO:9275 or 9303.

[0135] In some embodiments, the G protein or the biologically thereof is a mutant G protein that exhibits reduced binding for the native binding partner of a wild-type G protein. In some embodiments, the mutant G protein or the biologically active portion thereof is a mutant of wild-type Niv-G and exhibits reduced binding to one or both of the native binding partners Ephrin B2 or Ephrin B3. In some embodiments, the mutant G-protein or the biologically active portion, such as a mutant NiV-G protein, exhibits reduced binding to the native binding partner. In some embodiments, the reduced binding to Ephrin B2 or Ephrin B3 is reduced by greater than at or about 5%, at or about 10%, at or about 15%, at or about 20%, at or about 25%, at or about 30%, at or about 40%, at or about 50%, at or about 60%, at or about 70%, at or about 80%, at or about 90%, or at or about 100%.

[0136] In some embodiments, the mutations described herein improve transduction efficiency. In some embodiments, the mutations described herein allow for specific targeting of other desired cell types that are not Ephrin B2 or Ephrin B3. In some embodiments, the mutations described herein result in at least the partial inability to bind at least one natural receptor, such as to reduce the binding to at least one of Ephrin B2 or Ephrin B3. In some embodiments, the mutations described herein interfere with natural receptor recognition.

[0137] In some embodiments, the mutant NiV-G protein or the biologically active portion thereof is truncated and lacks up to 5 contiguous amino acid residues at or near the N-terminus of the wild-type NiV-G protein (SEQ ID NO:9285), 6 contiguous amino acid residues at or near the N-terminus of the wild-type NiV-G protein (SEQ ID NO: 9285), 7 contiguous amino acid residues at or near the N-terminus of the wild-type NiV-G protein (SEQ ID NO:9285), 8 contiguous amino acid residues at or near the N-terminus of the wild-type NiV-G protein (SEQ ID NO:9285), 9 contiguous amino acid residues at or near the N-terminus of the wild-type NiV-G protein (SEQ ID NO: 9285), 10 contiguous amino acid residues at or near the N-terminus of the wild-type NiV-G protein (SEQ ID NO:9285), 11 contiguous amino acid residues at or near the N-terminus of the wild-type NiV-G protein (SEQ ID NO:9285), 12 contiguous amino acid residues at or near the N-terminus of the wild-type NiV-G protein (SEQ ID NO: 9285), 13 contiguous amino acid residues at or near the N-terminus of the wild-type NiV-G protein (SEQ ID NO:9285), 14 contiguous amino acid residues at or near the N-terminus of the wild-type NiV-G protein (SEQ ID NO:9285), 15 contiguous amino acid residues at or near the N-terminus of the wild-type NiV-G protein (SEQ ID NO: 9285), 16 contiguous amino acid residues at or near the N-terminus of the wild-type NiV-G protein (SEQ ID NO:9285), 17 contiguous amino acid residues at or near the N-terminus of the wild-type NiV-G protein (SEQ ID NO:9285), 18 contiguous amino acid residues at or near the N-terminus of the wild-type NiV-G protein (SEQ ID NO: 9285), 19 contiguous amino acid residues at or near the N-terminus of the wild-type NiV-G protein (SEQ ID NO:9285), 20 contiguous amino acid residues at or near the N-terminus of the wild-type NiV-G protein (SEQ ID NO:9285), 21 contiguous amino acid residues at or near the N-terminus of the wild-type NiV-G protein (SEQ ID NO: 9285), 22 contiguous amino acid residues at or near the N-terminus of the wild-type NiV-G protein (SEQ ID NO:9285), 23 contiguous amino acid residues at or near the N-terminus of the wild-type NiV-G protein (SEQ ID NO:9285), 24 contiguous amino acid residues at or near the N-terminus of the wild-type NiV-G protein (SEQ ID NO: 9285), 25 contiguous amino acid residues at or near the N-terminus of the wild-type NiV-G protein (SEQ ID NO:9285), 26 contiguous amino acid residues at or near the N-terminus of the wild-type NiV-G protein (SEQ ID NO:9285), 27 contiguous amino acid residues at or near the N-terminus of the wild-type NiV-G protein (SEQ ID NO: 9285), 28 contiguous amino acid residues at or near the N-terminus of the wild-type NiV-G protein (SEQ ID NO:9285), 29 contiguous amino acid residues at or near the N-terminus of the wild-type NiV-G protein (SEQ ID NO:9285), 30 contiguous amino acid residues at or near the N-terminus of the wild-type NiV-G protein (SEQ ID NO: 9285), 31 contiguous amino acid residues at or near the N-terminus of the wild-type NiV-G protein (SEQ ID NO:9285), 32 contiguous amino acid residues at or near the N-terminus of the wild-type NiV-G protein (SEQ ID NO:9285), 33 contiguous amino acid residues at or near the N-terminus of the wild-type NiV-G protein (SEQ ID NO: 9285), 34 contiguous amino acid residues at or near the N-terminus of the wild-type NiV-G protein (SEQ ID NO:9285), 35 contiguous amino acid residues at or near the N-terminus of the wild-type NiV-G protein (SEQ ID NO:9285), 36 contiguous amino acid residues at or near the N-terminus of the wild-type NiV-G protein (SEQ ID NO: 9285), 37 contiguous amino acid residues at or near the N-terminus of the wild-type NiV-G protein (SEQ ID NO:9285), 38 contiguous amino acid residues at or near the N-terminus of the wild-type NiV-G protein (SEQ ID NO:9285), 39 contiguous amino acid residues at or near the N-terminus of the wild-type NiV-G protein (SEQ ID NO: 9285), or 40 contiguous amino acid residues at or near the N-terminus of the wild-type NiV-G protein (SEQ ID NO:9285).

[0138] In some embodiments, the G protein contains one or more amino acid substitutions in a residue that is involved in the interaction with one or both of Ephrin B2 and Ephrin B3. In some embodiments, the amino acid substitutions correspond to mutations E501A, W504A, Q530A, and E533A with reference to numbering set forth in SEQ ID NO:9285.

[0139] In some embodiments, the G protein is a mutant G protein containing one or more amino acid substitutions selected from the group consisting of E501A, W504A, Q530A, and E533A with reference to numbering set forth in SEQ ID NO:9285. In some embodiments, the G protein is a mutant G protein that contains one or more amino acid substitutions selected from the group consisting of E501A, W504A, Q530A, and E533A with reference to SEQ ID NO:9285 or a biologically active portion thereof containing an N-terminal truncation. In some embodiments, the G protein is a mutant G protein that contains one or more amino acid substitutions selected from the group consisting of E501A, W504A, Q530A, and E533A in combination with any one of the N-terminal truncations disclosed above with reference to SEQ ID NO:9285 or a biologically active portion thereof. In some embodiments, any of the mutant G proteins described above contains one, two, three, or all four amino acid selected from the group consisting of E501A, W504A, Q530A, and E533A with reference to numbering set forth in SEQ ID NO:9285, in all pairwise and triple combinations thereof.

[0140] In some embodiments, the mutant NiV-G protein has the amino acid sequence set forth in SEQ ID NO:9273 or 9302 or an amino acid sequence having at least at or about 90%, at least at or about 91%, at least at or about 92%, at least at or about 93%, at least at or about 94%, at least at or about 95%, at least at or about 96%, at least at or about 97%, at least at or about 98%, or at least at or about 99% sequence identity to SEQ ID NO:9273 or 9302. In particular embodiments, the G protein has the sequence of amino acids set forth in SEQ ID NO:9273 or 9302.

[0141] In some embodiments, the targeted envelope protein contains a G protein or a functionally active variant or biologically active portion thereof and an sdAb variable domain, in which the targeted envelope protein exhibits increased binding for another molecule that is different from the native binding partner of a wild-type G protein. In some embodiments, the other molecule is a protein expressed on the surface of desired target cell. In some embodiments, the increased binding to the other molecule is increased by greater than at or about 25%, at or about 30%, at or about 40%, at or about 50%, at or about 60%, at or about 70%, at or about 80%, at or about 90%, or at or about 100%. In particular embodiments, the binding confers re-targeted binding compared to the binding of a wild-type G protein in which a new or different binding activity is conferred.

[0142] In some embodiments, the C-terminus of the single domain antibody is attached to the C-terminus of the G protein or biologically active portion thereof. In some embodiments, the N-terminus of the single domain antibody is exposed on the exterior surface of the lipid bilayer. In some embodiments, the N-terminus of the single domain antibody binds to a cell surface molecule of a target cell. In some embodiments, the single domain antibody specifically binds to a cell surface molecule present on a target cell. In some embodiments, the cell surface molecule is a protein, glycan, lipid, or low molecular weight molecule.

[0143] In some embodiments, the cell surface molecule of a target cell is an antigen or portion thereof. In some embodiments, the single domain antibody or portion thereof is an antibody having a single monomeric domain antigen binding/recognition domain that is able to bind selectively to a specific antigen. In some embodiments, the single domain antibody binds an antigen present on a target cell.

[0144] Exemplary cells include immune effector cells, peripheral blood mononuclear cells (PBMCs) such as lymphocytes (T cells, B cells, natural killer cells) and monocytes, granulocytes (neutrophils, basophils, eosinophils), macrophages, dendritic cells, cytotoxic T lymphocytes, polymorphonuclear cells (also known as PMNs, PMLs, or PMNLs), stem cells, embryonic stem cells (ESs or ECSs), neural stem cells, mesenchymal stem cells (MSCs), hematopoietic stem cells (HSCs), human myogenic stem cells, muscle-derived stem cells (MuStem), limbal epithelial stem cells, cardio-myogenic stem cells, cardiomyocytes, progenitor cells, allogenic cells, resident cardiac cells, induced pluripotent stem cells (iPSs or iPSCs), adipose-derived or phenotypic modified stem or progenitor cells, CD133+ cells, aldehyde dehydrogenase-positive cells (ALDH+), umbilical cord blood (UCB) cells, peripheral blood stem cells (PBSCs), neurons, neural progenitor cells, pancreatic beta cells, glial cells, or hepatocytes.

[0145] In some embodiments, the target cell is a cell of a target tissue. The target tissue can include liver, lungs, heart, spleen, pancreas, gastrointestinal tract, kidney, testes, ovaries, brain, reproductive organs, central nervous system, peripheral nervous system, skeletal muscle, endothelium, inner ear, or eye.

[0146] In some embodiments, the target cell is a muscle cell (e.g., skeletal muscle cell), kidney cell, liver cell (e.g. hepatocyte), or a cardiac cell (e.g. cardiomyocyte). In some embodiments, the target cell is a cardiac cell, e.g., a cardiomyocyte (e.g., a quiescent cardiomyocyte), a hepatoblast (e.g., a bile duct hepatoblast), an epithelial cell, a T cell (e.g. a naive T cell), a macrophage (e.g., a tumor infiltrating macrophage), or a fibroblast (e.g., a cardiac fibroblast).

[0147] In some embodiments, the target cell is a tumor-infiltrating lymphocyte, a T cell, a neoplastic or tumor cell, a virus-infected cell, a stem cell, a central nervous system (CNS) cell, a hematopoietic stem cell (HSC), a liver cell or a fully differentiated cell. In some embodiments, the target cell is a CD3+ T cell, a CD4+ T cell, a CD8+ T cell, a hepatocyte, a hematopoietic stem cell, a CD34+ hematopoietic stem cell, a CD105+ hematopoietic stem cell, a CD117+ hematopoietic stem cell, a CD105+ endothelial cell, a B cell, a CD20+ B cell, a CD19+ B cell, a cancer cell, a CD133+ cancer cell, an EpCAM+ cancer cell, a CD19+ cancer cell, a Her2/Neu+ cancer cell, a GluA2+ neuron, a GluA4+ neuron, a NKG2D+ natural killer cell, a SLC1A3+ astrocyte, a SLC7A10+ adipocyte, or a CD30+ lung epithelial cell.

[0148] In some embodiments, the target cell is an antigen presenting cell, an MHC class II+ cell, a professional antigen presenting cell, an atypical antigen presenting cell, a macrophage, a dendritic cell, a myeloid dendritic cell, a plasmacytoid dendritic cell, a CD11c+ cell, a CD11b+ cell, a splenocyte, a B cell, a hepatocyte, a endothelial cell, or a non-cancerous cell. In some embodiments, the cell surface molecule is any one of CD4.

[0149] In some embodiments, the G protein or functionally active variant or biologically active portion thereof is linked directly to the sdAb variable domain (e.g., a VHH) or scFv. In some embodiments, the targeted envelope protein is a fusion protein that has the following structure: (N′-single domain antibody-C′)-(C′-G protein-N′). In some embodiments, the targeted envelope protein is a fusion protein that has the following structure: (N′-scFv-C′)-(C′-G protein-N′).

[0150] In some embodiments, the G protein or functionally active variant or biologically active portion thereof is linked indirectly via a linker to the sdAb variable domain or scFv. In some embodiments, the linker is a peptide linker, such as a polypeptide linker. In some embodiments, the linker is a chemical linker.

[0151] In some embodiments, the linker is a peptide linker and the targeted envelope protein is a fusion protein containing the G protein or functionally active variant or biologically active portion thereof linked via a peptide linker to the sdAb variable domain or svFv. In some embodiments, the targeted envelope protein is a fusion protein that has the following structure: (N′-single domain antibody-C′)-Linker-(C′-G protein-N′). In some embodiments, the targeted envelope protein is a fusion protein that has the following structure: (N′-scFv-C′)-Linker-(C′-G protein-N′). In some embodiments, the peptide linker is a polypeptide linker up to 65 amino acids in length. In some embodiments, the peptide linker comprises from or from about 2 to 65 amino acids, 2 to 60 amino acids, 2 to 56 amino acids, 2 to 52 amino acids, 2 to 48 amino acids, 2 to 44 amino acids, 2 to 40 amino acids, 2 to 36 amino acids, 2 to 32 amino acids, 2 to 28 amino acids, 2 to 24 amino acids, 2 to 20 amino acids, 2 to 18 amino acids, 2 to 14 amino acids, 2 to 12 amino acids, 2 to 10 amino acids, 2 to 8 amino acids, 2 to 6 amino acids, 6 to 65 amino acids, 6 to 60 amino acids, 6 to 56 amino acids, 6 to 52 amino acids, 6 to 48 amino acids, 6 to 44 amino acids, 6 to 40 amino acids, 6 to 36 amino acids, 6 to 32 amino acids, 6 to 28 amino acids, 6 to 24 amino acids, 6 to 20 amino acids, 6 to 18 amino acids, 6 to 14 amino acids, 6 to 12 amino acids, 6 to 10 amino acids, 6 to 8 amino acids, 8 to 65 amino acids, 8 to 60 amino acids, 8 to 56 amino acids, 8 to 52 amino acids, 8 to 48 amino acids, 8 to 44 amino acids, 8 to 40 amino acids, 8 to 36 amino acids, 8 to 32 amino acids, 8 to 28 amino acids, 8 to 24 amino acids, 8 to 20 amino acids, 8 to 18 amino acids, 8 to 14 amino acids, 8 to 12 amino acids, 8 to 10 amino acids, 10 to 65 amino acids, 10 to 60 amino acids, 10 to 56 amino acids, 10 to 52 amino acids, 10 to 48 amino acids, 10 to 44 amino acids, 10 to 40 amino acids, 10 to 36 amino acids, 10 to 32 amino acids, 10 to 28 amino acids, 10 to 24 amino acids, 10 to 20 amino acids, 10 to 18 amino acids, 10 to 14 amino acids, 10 to 12 amino acids, 12 to 65 amino acids, 12 to 60 amino acids, 12 to 56 amino acids, 12 to 52 amino acids, 12 to 48 amino acids, 12 to 44 amino acids, 12 to 40 amino acids, 12 to 36 amino acids, 12 to 32 amino acids, 12 to 28 amino acids, 12 to 24 amino acids, 12 to 20 amino acids, 12 to 18 amino acids, 12 to 14 amino acids, 14 to 65 amino acids, 14 to 60 amino acids, 14 to 56 amino acids, 14 to 52 amino acids, 14 to 48 amino acids, 14 to 44 amino acids, 14 to 40 amino acids, 14 to 36 amino acids, 14 to 32 amino acids, 14 to 28 amino acids, 14 to 24 amino acids, 14 to 20 amino acids, 14 to 18 amino acids, 18 to 65 amino acids, 18 to 60 amino acids, 18 to 56 amino acids, 18 to 52 amino acids, 18 to 48 amino acids, 18 to 44 amino acids, 18 to 40 amino acids, 18 to 36 amino acids, 18 to 32 amino acids, 18 to 28 amino acids, 18 to 24 amino acids, 18 to 20 amino acids, 20 to 65 amino acids, 20 to 60 amino acids, 20 to 56 amino acids, 20 to 52 amino acids, 20 to 48 amino acids, 20 to 44 amino acids, 20 to 40 amino acids, 20 to 36 amino acids, 20 to 32 amino acids, 20 to 28 amino acids, 20 to 26 amino acids, 20 to 24 amino acids, 24 to 65 amino acids, 24 to 60 amino acids, 24 to 56 amino acids, 24 to 52 amino acids, 24 to 48 amino acids, 24 to 44 amino acids, 24 to 40 amino acids, 24 to 36 amino acids, 24 to 32 amino acids, 24 to 30 amino acids, 24 to 28 amino acids, 28 to 65 amino acids, 28 to 60 amino acids, 28 to 56 amino acids, 28 to 52 amino acids, 28 to 48 amino acids, 28 to 44 amino acids, 28 to 40 amino acids, 28 to 36 amino acids, 28 to 34 amino acids, 28 to 32 amino acids, 32 to 65 amino acids, 32 to 60 amino acids, 32 to 56 amino acids, 32 to 52 amino acids, 32 to 48 amino acids, 32 to 44 amino acids, 32 to 40 amino acids, 32 to 38 amino acids, 32 to 36 amino acids, 36 to 65 amino acids, 36 to 60 amino acids, 36 to 56 amino acids, 36 to 52 amino acids, 36 to 48 amino acids, 36 to 44 amino acids, 36 to 40 amino acids, 40 to 65 amino acids, 40 to 60 amino acids, 40 to 56 amino acids, 40 to 52 amino acids, 40 to 48 amino acids, 40 to 44 amino acids, 44 to 65 amino acids, 44 to 60 amino acids, 44 to 56 amino acids, 44 to 52 amino acids, 44 to 48 amino acids, 48 to 65 amino acids, 48 to 60 amino acids, 48 to 56 amino acids, 48 to 52 amino acids, 50 to 65 amino acids, 50 to 60 amino acids, 50 to 56 amino acids, 50 to 52 amino acids, 54 to 65 amino acids, 54 to 60 amino acids, 54 to 56 amino acids, 58 to 65 amino acids, 58 to 60 amino acids, or 60 to 65 amino acids. In some embodiments, the peptide linker is a peptide that is 3, 4, 5, 6, 7, 8, 9, 10, 11, 12, 13, 14, 15, 16, 17, 18, 19, 20, 21, 22, 23, 24, 25, 26, 27, 28, 29, 30, 31, 32, 33, 34, 35, 36, 37, 38, 39, 40, 41, 42, 43, 44, 45, 46, 47, 48, 49, 50, 51, 52, 53, 54, 55, 56, 57, 58, 59, 60, 61, 62, 63, 64, or 65 amino acids in length.

[0152] In particular embodiments, the linker is a flexible peptide linker. In some such embodiments, the linker is 1-20 amino acids, such as 1-20 amino acids predominantly composed of glycine. In some embodiments, the linker is 1-20 amino acids, such as 1-20 amino acids predominantly composed of glycine and serine. In some embodiments, the linker is a flexible peptide linker containing amino acids Glycine and Serine, referred to as GS-linkers. In some embodiments, the peptide linker includes the sequences GS, GGS, GGGGS (SEQ ID NO:9294), GGGGGS (SEQ ID NO:9292) or combinations thereof. In some embodiments, the peptide linker is a polypeptide linker that has the sequence (GGS) n (SEQ ID NO: 14126), wherein n is 1 to 10. In some embodiments, the peptide linker is a polypeptide linker that has the sequence (GGGGS) n, (SEQ ID NO:9293) wherein n is 1 to 10. In some embodiments, the peptide linker is a polypeptide linker that has the sequence (GGGGGS) n (SEQ ID NO:9284), wherein n is 1 to 6.

[0153] Also provided herein are polynucleotides comprising a nucleic acid sequence encoding a targeted envelope protein. In some embodiments, the polynucleotides comprise a nucleic acid sequence encoding a G protein or biologically active portion thereof. In some embodiments, the polynucleotides further comprise a nucleic acid sequence encoding a single domain antibody (sdAb) variable domain or scFv or biologically active portion thereof. The polynucleotides may include a sequence of nucleotides encoding any of the targeted envelope proteins described above. The polynucleotide can be a synthetic nucleic acid. Also provided are expression vectors containing any of the provided polynucleotides.

[0154] In some of any embodiments, expression of natural or synthetic nucleic acids is typically achieved by operably linking a nucleic acid encoding the gene of interest to a promoter and incorporating the construct into an expression vector. In some embodiments, vectors are suitable for replication and integration in eukaryotes. In some embodiments, cloning vectors contain transcription and translation terminators, initiation sequences, and promoters useful for expression of the desired nucleic acid sequence. In some of any embodiments described herein, a plasmid comprises a promoter suitable for expression in a cell.

[0155] In some embodiments, the polynucleotides contain at least one promoter that is operatively linked to control expression of the targeted envelope protein containing the G protein and the single domain antibody (sdAb) variable domain or scFv. For expression of the targeted envelope protein, at least one element in each promoter functions to position the start site for RNA synthesis. The best-known example of this is the TATA box, but in some promoters lacking a TATA box, such as the promoter for the mammalian terminal deoxynucleotidyl transferase gene and the promoter for the SV40 genes, a discrete element overlying the start site itself helps to fix the place of initiation.

[0156] In some embodiments, additional promoter elements, e.g., enhancers, regulate the frequency of transcriptional initiation. In some embodiments, additional promoter elements are located in the region 30-110 bp upstream of the start site, although a number of promoters have been shown to contain functional elements downstream of the start site as well. In some embodiments, spacing between promoter elements frequently is flexible, so that promoter function is preserved when elements are inverted or moved relative to one another. In some embodiments, such as with the thymidine kinase (tk) promoter, the spacing between promoter elements is increased to 50 bp apart before activity begins to decline. In some embodiments, depending on the promoter, individual elements function either cooperatively or independently to activate transcription.

[0157] A promoter may be one naturally associated with a gene or polynucleotide sequence, as may be obtained by isolating the 5′ non-coding sequences located upstream of the coding segment and/or exon. Such a promoter can be referred to as “endogenous.” Similarly, an enhancer may be one naturally associated with a polynucleotide sequence, located either downstream or upstream of that sequence. Alternatively, certain advantages will be gained by positioning the coding polynucleotide segment under the control of a recombinant or heterologous promoter, which refers to a promoter that is not normally associated with a polynucleotide sequence in its natural environment. A recombinant or heterologous enhancer refers also to an enhancer not normally associated with a polynucleotide sequence in its natural environment. Such promoters or enhancers may include promoters or enhancers of other genes, and promoters or enhancers isolated from any other prokaryotic, viral, or eukaryotic cell, and promoters or enhancers not “naturally occurring,” i.e., containing different elements of different transcriptional regulatory regions, and/or mutations that alter expression. In addition to producing nucleic acid sequences of promoters and enhancers synthetically, sequences may be produced using recombinant cloning and/or nucleic acid amplification technology, including PCR, in connection with the compositions disclosed herein.

[0158] In some embodiments, a suitable promoter is the immediate early cytomegalovirus (CMV) promoter sequence. In some embodiments, the promoter sequence is a strong constitutive promoter sequence capable of driving high levels of expression of any polynucleotide sequence operatively linked thereto. In some embodiments, a suitable promoter is Elongation Growth Factor-la (EF-I a). In some embodiments, other constitutive promoter sequences are also used, including, but not limited to the simian virus 40 (SV40) early promoter, mouse mammary tumor virus (MMTV), human immunodeficiency virus (HIV) long terminal repeat (LTR) promoter, MoMuLV promoter, an avian leukemia virus promoter, an Epstein-Barr virus immediate early promoter, a Rous sarcoma virus promoter, as well as human gene promoters such as, but not limited to, the actin promoter, the myosin promoter, the hemoglobin promoter, and the creatine kinase promoter.

[0159] In some embodiments, the promoter is an inducible promoter. In some embodiments, the inducible promoter provides a molecular switch capable of turning on expression of the polynucleotide sequence to which it is operatively linked when such expression is desired, or turning off the expression when expression is not desired. In some embodiments, inducible promoters comprise a metallothionine promoter, a glucocorticoid promoter, a progesterone promoter, and a tetracycline promoter.

[0160] In some embodiments, exogenously controlled inducible promoters are used to regulate expression of the G protein and single domain antibody (sdAb) variable domain or scFv. For example, radiation-inducible promoters, heat-inducible promoters, and/or drug-inducible promoters can be used to selectively drive transgene expression in, for example, targeted regions. In such embodiments, the location, duration, and level of transgene expression is regulated by the administration of the exogenous source of induction.

[0161] In some embodiments, expression of the targeted envelope protein containing a G protein and single domain antibody (sdAb) variable domain or scFv is regulated using a drug-inducible promoter. For example, in some cases, the promoter, enhancer, or transactivator comprises a Lac operator sequence, a tetracycline operator sequence, a galactose operator sequence, a doxycycline operator sequence, a rapamycin operator sequence, a tamoxifen operator sequence, or a hormone-responsive operator sequence, or an analog thereof. In some instances, the inducible promoter comprises a tetracycline response element (TRE). In some embodiments, the inducible promoter comprises an estrogen response element (ERE), which can activate gene expression in the presence of tamoxifen. In some instances, a drug-inducible element, such as a TRE, is combined with a selected promoter to enhance transcription in the presence of drug, such as doxycycline. In some embodiments, the drug-inducible promoter is a small molecule-inducible promoter.

[0162] Any of the provided polynucleotides can be modified to remove CpG motifs and/or to optimize codons for translation in a particular species, such as human, canine, feline, equine, ovine, bovine, etc. species. In some embodiments, the polynucleotides are optimized for human codon usage (i.e., human codon-optimized). In some embodiments, the polynucleotides are modified to remove CpG motifs. In other embodiments, the provided polynucleotides are modified to remove CpG motifs and are codon-optimized, such as human codon-optimized. Methods of codon optimization and CpG motif detection and modification are well-known. Typically, polynucleotide optimization enhances transgene expression, increases transgene stability and preserves the amino acid sequence of the encoded polypeptide.

[0163] In order to assess the expression of the targeted envelope protein, the expression vector to be introduced into a cell can also contain either a selectable marker gene or a reporter gene or both to facilitate identification and selection of expressing particles, e.g. viral particles. In other embodiments, the selectable marker is carried on a separate piece of DNA and used in a co-transfection procedure. Both selectable markers and reporter genes may be flanked with appropriate regulatory sequences to enable expression in the host cells. Useful selectable markers are known in the art and include, for example, antibiotic-resistance genes, such as neo and the like.

[0164] Reporter genes are used for identifying potentially transfected cells and for evaluating the functionality of regulatory sequences. Reporter genes that encode for easily assayable proteins are well known in the art. In general, a reporter gene is a gene that is not present in or expressed by the recipient organism or tissue and that encodes a protein whose expression is manifested by some easily detectable property, e.g., enzymatic activity. Expression of the reporter gene is assayed at a suitable time after the DNA has been introduced into the recipient cells.

[0165] Suitable reporter genes may include genes encoding luciferase, beta-galactosidase, chloramphenicol acetyl transferase, secreted alkaline phosphatase, or the green fluorescent protein gene (see, e.g., Ui-Tei et al., 2000, FEBS Lett. 479:79-82). Suitable expression systems are well known and may be prepared using well known techniques or obtained commercially. Internal deletion constructs may be generated using unique internal restriction sites or by partial digestion of non-unique restriction sites. Constructs may then be transfected into cells that display high levels of the desired polynucleotide and/or polypeptide expression. In general, the construct with the minimal 5′ flanking region showing the highest level of expression of reporter gene is identified as the promoter. Such promoter regions may be linked to a reporter gene and used to evaluate agents for the ability to modulate promoter-driven transcription.

### Lipid Particles Targeting CD4

[0166] Also provided herein are targeted lipid particles (e.g. targeting CD4), such as targeted viral vectors, that comprise a F protein molecule or biologically active portion thereof of the Paramyxoviridae family, and a fusion protein comprising (i) an envelope attachment glycoprotein G (G protein), hemagglutinin (H Protein), or hemagglutinin-neuraminidase (HN Protein), or a biologically active portion thereof of the Paramyxoviridae family, and (ii) a single domain antibody (sdAb) variable domain or scFv, wherein the single domain antibody variable domain or scFv is attached to the C-terminus of the G protein or the biologically active portion, wherein each is exposed on the outer surface of the targeted lipid particle. In particular embodiments, the provided targeted lipid particles exhibit fusogenic activity, which is mediated by the targeted envelope protein that facilitates binding to a target cell and contains the G protein or biologically active portion thereof, and the F protein or biologically active portion thereof that is involved in facilitating the merger or fusion of the two lumens of the lipid particle and the target cell membranes. Table 25 provides non-limiting examples of G and F proteins for use in the targeted lipid particles of the disclosure.

[0167] In some embodiments, the targeted lipid particle provided herein (e.g. targeted lentiviral vector) has increased or greater expression of the targeted envelope protein compared to a reference lipid particle (e.g. reference lentiviral vector) that incorporates a similar envelope protein but that is fused to an alternative targeting moiety other than a sdAb variable domain, such as a single chain variable fragment (scFv). In some embodiments, the targeted lipid particles are produced by pseudotyping of viral vectors (e.g lentiviral particles) following co-transfection of the packaging cells with the transfer, envelope, and gag-pol plasmids.

[0168] In some embodiments, the expression is increased by at or greater than 5%, 10%, 20%, 30%, 40%, 50%, 60%, 70%, 80%, 90%, 100%, 125%, 150%, 200%, 300%, 400%, 500% or more, compared to a reference lipid particle (e.g. reference lentiviral vector), e.g. a reference lipid particle containing a similar envelope protein but that is fused to an scFv. In some examples, the expression is increased by at or greater than 1.5-fold, 2-fold, 3-fold, 4-fold, 5-fold, 6-fold, 7-fold, 8-fold, 9-fold, 10-fold, 15-fold, 20-fold, 30-fold or more, compared to a reference lipid particle (e.g. reference lentiviral vector), e.g. a reference lipid particle containing a similar envelope protein but that is fused to an scFv. In some embodiments, expression is assayed in vitro using flow cytometry, e.g. FACs. In some embodiments, expression can be depicted as the number or density of targeted envelope protein on the surface of a targeted lipid particle (e.g. targeted lentiviral vector). In some embodiments, expression is depicted as the mean fluorescent intensity (MFI) of surface expression of the targeted envelope protein on the surface of a targeted lipid particle (e.g. targeted lentiviral vector). In some embodiments, expression is depicted as the percent of lipid particle (e.g. lentiviral vectors) in a population that are surface positive for the targeted envelope protein.

[0169] In some embodiments, in a population of targeted lipid particles (e.g. targeted lentiviral vectors) greater than at or about 50% of the lipid particles are surface positive for the targeted envelope protein. For example, in a population of provided targeted lipid particle (e.g. targeted lentiviral vectors) greater than at or about 55%, greater than at or about 60%, greater than at or about 65%, greater than at or about 70%, or greater than at or about 75% of the viral vectors in the population are surface positive for the targeted envelope protein.

[0170] In some embodiments, titer of the targeted lipid particles following introduction into target cells, such as by transduction (e.g. transduced cells), is increased compared to titer into the same target cells of reference lipid particles (e.g. reference lentiviral vector) that incorporate a similar envelope protein but fused to an alternative targeting moiety other than a sdAb variable domain, such as a single chain variable fragment (scFv). Typically, the alternative targeting moiety recognizes or binds the same target molecule as the sdAb variable domain of the targeted envelope protein of the targeted lipid particles. In some embodiments, the titer is increased by at or greater than 5%, 10%, 20%, 30%, 40%, 50%, 60%, 70%, 80%, 90%, 100%, 125%, 150%, 200%, 300%, 400%, 500% or more, compared to titer of a reference lipid particle (e.g. reference lentiviral vector), e.g. a reference lipid particle containing a similar envelope protein but that is fused to an scFv. In some examples, the titer is increased by at or greater than 1.5-fold, 2-fold, 3-fold, 4-fold, 5-fold, 6-fold, 7-fold, 8-fold, 9-fold, 10-fold, 15-fold, 20-fold, 30-fold or more, compared to the titer of a reference lipid particle (e.g. reference lentiviral vector), e.g. a reference viral vector containing a similar envelope protein but that is fused to an scFv. In some embodiments, the titer of the targeted lipid particles in target cells (e.g. transduced cells) is greater than at or about 1×10⁶ transduction units (TU)/mL. For example, the titer of the targeted lipid particles in target cells (e.g. transduced cells) is greater than at or about 2×10⁶ TU/mL, greater than at or about 3×10⁶ TU/mL, greater than at or about 4×10⁶ TU/mL, greater than at or about 5×10⁶ TU/mL, greater than at or about 6×10⁶ TU/mL, greater than at or about 7×10⁶ TU/mL, greater than at or about 8×10⁶ TU/mL, greater than at or about 9×10⁶ TU/mL, or greater than at or about 1×10⁷ TU/mL.

### A. F Proteins

[0171] In some embodiments, the targeted lipid particle comprises one or more fusogens, e.g. F proteins of the Paramyxoviridae family. In some embodiments, the targeted lipid particle contains an exogenous or overexpressed fusogen. In some embodiments, the fusogen is disposed in the lipid bilayer. In some embodiments, the fusogen facilitates the fusion of the targeted particle's lipid bilayer to a membrane. In some embodiments, the membrane is a plasma cell membrane.

[0172] In some embodiments, fusogens comprise protein based, lipid based, and chemical based fusogens. In some embodiments, the targeted lipid particle comprises a first fusogen comprising a protein fusogen and a second fusogen comprising a lipid fusogen or chemical fusogen. In some embodiments, the fusogen binds a fusogen binding partner on a target cell surface.

[0173] In some embodiments, the fusogen comprises a protein with a hydrophobic fusion polypeptide domain. In some embodiments the fusogen comprises an F protein of the Paramyxoviridae family. In some embodiments the fusogen contains a Nipah virus protein F, a measles virus F protein, a tupaia paramyxovirus F protein, a paramyxovirus F protein, a Hendra virus F protein, a Henipavirus F protein, a Morbilivirus F protein, a respirovirus F protein, a Sendai virus F protein, a rubulavirus F protein, or an avulavirus F protein, or a biologically active portion thereof.

[0174] In some embodiments, the fusion protein is a hemagglutinin-neuraminidase (HN) of the Paramyxoviridae family and/or F protein of the Paramyxoviridae family. In some embodiments, the respiratory paramyxovirus is a Sendai virus. The HN and F glycoproteins of Sendai viruses function to attach to sialic acids via the HN protein, and to mediate cell fusion for entry to cells via the F protein. In some embodiments, the fusion protein is a F and/or HN protein from the murine parainfluenza virus type 1 (See e.g., U.S. Pat. No. 10,704,061).

[0175] In some embodiments, the N-terminal hydrophobic fusion polypeptide domain of the F protein molecule or biologically active portion thereof is exposed on the outside of a lipid bilayer.

[0176] F proteins of henipaviruses are encoded as F₀ precursors containing a signal polypeptide (e.g. corresponding to amino acid residues 1-26 of SEQ ID NO: 592). Following cleavage of the signal polypeptide, the mature F₀ (e.g. SEQ ID NO: 593) is transported to the cell surface, then endocytosed and cleaved by cathepsin L (e.g. between amino acids 109-110 of SEQ ID NO: 592) into the mature fusogenic subunits F1 (e.g. corresponding to amino acids 110-546 of SEQ ID NO:9258; set forth in SEQ ID NO:9261) and F2 (e.g. corresponding to amino acid residues 27-109 of SEQ ID NO:1; set forth in SEQ ID NO:9260). The F1 and F2 subunits are associated by a disulfide bond and recycled back to the cell surface. The F1 subunit contains the fusion polypeptide domain located at the N terminus of the F1 subunit (e.g., corresponding to amino acids 110-129 of SEQ ID NO:9258) where it is able to insert into a cell membrane to drive fusion. In some cases, fusion activity is blocked by association of the F protein with G protein, until G engages with a target molecule resulting in its disassociation from F and exposure of the fusion polypeptide to mediate membrane fusion.

[0177] Among different henipavirus species, the sequence and activity of the F protein is highly conserved. For example, the F protein of NiV and HeV viruses share 89% amino acid sequence identity. Further, in some cases, the henipavirus F proteins exhibit compatibility with G proteins from other species to trigger fusion (Brandel-Tretheway et al. Journal of Virology. 2019. 93(13):e00577-19). In some aspects of the provided targeted lipid particle, the F protein is heterologous to the G protein, i.e., the F and G protein or biologically active portions thereof are from different henipavirus species. For example, the F protein is from Hendra virus and the G protein is from Nipah virus. In other aspects, the F protein can be a chimeric F protein containing regions of F proteins from different species of Henipavirus. In some embodiments, switching a region of amino acid residues of the F protein from one species of Henipavirus to another can result in fusion to the G protein of the species comprising the amino acid insertion. (Brandel-Tretheway et al. 2019). In some cases, the chimeric F protein contains an extracellular domain from one henipavirus species and a transmembrane and/or cytoplasmic domain from a different henipavirus species. For example, the F protein may contain an extracellular domain of Hendra virus and a transmembrane/cytoplasmic domain of Nipah virus. F protein sequences disclosed herein are predominantly disclosed as expressed sequences including an N-terminal signal sequence. Such N-terminal signal sequences are commonly cleaved co- or post-translationally, thus the mature protein sequences for all F protein sequences disclosed herein are also contemplated as lacking the N-terminal signal sequence.

[0178] In some embodiments, the F protein is encoded by a polynucleotide sequence that encodes the sequence set forth by any one of SEQ ID NOs: 592, 593, 608, 614-616, or 641-644, or is a functionally active variant or a biologically active portion thereof that has a sequence that is at least at or about 80%, at least at or about 85%, at least at or about 90%, at least at or about 91%, at least at or about 92%, at least at or about 93%, at least at or about 94%, at least at or about 95%, at least at or about 96%, at least at or about 97%, at least at or about 98%, or at least at or about 99% identical to any one of SEQ ID NOS: 592, 593, 608, 614-616, or 641-644. In particular embodiments, the F protein or the functionally active variant or biologically active portion thereof retains fusogenic activity in conjunction with a Henipavirus G protein, such as a G protein set forth herein. Fusogenic activity includes the activity of the F protein in conjunction with a Henipavirus G protein to promote or facilitate fusion of two membrane lumens, such as the lumen of the targeted lipid particle having embedded in its lipid bilayer a henipavirus F and G protein, and a cytoplasm of a target cell, e.g., a cell that contains a surface receptor or molecule that is recognized or bound by the targeted envelope protein. In some embodiments, the F protein and G protein are from the same Henipavirus species (e.g. NiV-G and NiV-F). In some embodiments, the F protein and G protein are from different Henipavirus species (e.g., NiV-G and HeV-F). In particular embodiments, the F protein of the functionally active variant or biologically active portion retains the cleavage site cleaved by cathepsin L (e.g., corresponding to the cleavage site between amino acids 109-110 of SEQ ID NO:9258).

[0179] In particular embodiments, the F protein has the sequence of amino acids set forth in SEQ ID NO:9258, SEQ ID NO:9259, SEQ ID NO:9274, SEQ ID NO:9281, SEQ ID NO: 9282, SEQ ID NO:9283, SEQ ID NO:9308, SEQ ID NO:9309, SEQ ID NO:9310, or SEQ ID NO:9311 or is a functionally active variant thereof or a biologically active portion thereof that retains fusogenic activity. In some embodiments, the functionally active variant comprises an amino acid sequence having at least at or about 80%, at least at or about 85%, at least at or about 90%, at least at or about 91%, at least at or about 92%, at least at or about 93%, at least at or about 94%, at least at or about 95%, at least at or about 96%, at least at or about 97%, at least at or about 98%, or at least at or about 99% sequence identity to SEQ ID NO:9258, SEQ ID NO:9259, SEQ ID NO:9274, SEQ ID NO:9281, SEQ ID NO:9282, SEQ ID NO:9283, SEQ ID NO: 9308, SEQ ID NO: 9309, SEQ ID NO:9310, or SEQ ID NO:9311 and retains fusogenic activity in conjunction with a Henipavirus G protein (e.g., NiV-G or HeV-G). In some embodiments, the biologically active portion has an amino acid sequence having at least at or about 80%, at least at or about 85%, at least at or about 90%, at least at or about 91%, at least at or about 92%, at least at or about 93%, at least at or about 94%, at least at or about 95%, at or about 96%, at least at or about 97%, at least at or about 98%, or at least at or about 99% sequence identity to SEQ ID NO: 9258, SEQ ID NO:9259, SEQ ID NO:9274, SEQ ID NO:9281, SEQ ID NO:9282, SEQ ID NO:9283, SEQ ID NO:9308, SEQ ID NO:9309, SEQ ID NO:9310, or SEQ ID NO: 9311 and retains fusogenic activity in conjunction with a Henipavirus G protein (e.g., NiV-G or HeV-G).

[0180] Reference to retaining fusogenic activity includes activity (in conjunction with a Henipavirus G protein) that is at or about 10% to at or about 150% or more of the level or degree of binding of the corresponding wild-type F protein, such as set forth in SEQ ID NO:9258, SEQ ID NO:9259, SEQ ID NO:9274, SEQ ID NO:9281, SEQ ID NO: 9282, SEQ ID NO: 9283, SEQ ID NO:9308, SEQ ID NO:9309, SEQ ID NO:9310, or SEQ ID NO:9311, such as at least or at least about 10% of the level or degree of fusogenic activity of the corresponding wild-type F protein, such as at least or at least about 15% of the level or degree of fusogenic activity of the corresponding wild-type F protein, such as at least or at least about 20% of the level or degree of fusogenic activity of the corresponding wild-type F protein, such as at least or at least about 25% of the level or degree of fusogenic activity of the corresponding wild-type F protein, such as at least or at least about 30% of the level or degree of fusogenic activity of the corresponding wild-type F protein, such as at least or at least about 35% of the level or degree of fusogenic activity of the corresponding wild-type F protein, such as at least or at least about 40% of the level or degree of fusogenic activity of the corresponding wild-type F protein, such as at least or at least about 45% of the level or degree of fusogenic activity of the corresponding wild-type F protein, such as at least or at least about 50% of the level or degree of fusogenic activity of the corresponding wild-type F protein, such as at least or at least about 55% of the level or degree of fusogenic activity of the corresponding wild-type f protein, such as at least or at least about 60% of the level or degree of fusogenic activity of the corresponding wild-type F protein, such as at least or at least about 65% of the level or degree of fusogenic activity of the corresponding wild-type F protein, such as at least or at least about 70% of the level or degree of fusogenic activity of the corresponding wild-type F protein, such as at least or at least about 75% of the level or degree of fusogenic activity of the corresponding wild-type F protein, such as at least or at least about 80% of the level or degree of fusogenic activity of the corresponding wild-type F protein, such as at least or at least about 85% of the level or degree of fusogenic activity of the corresponding wild-type F protein, such as at least or at least about 90% of the level or degree of fusogenic activity of the corresponding wild-type F protein, such as at least or at least about 95% of the level or degree of fusogenic activity of the corresponding wild-type F protein, such as at least or at least about 100% of the level or degree of fusogenic activity of the corresponding wild-type F protein, or such as at least or at least about 120% of the level or degree of fusogenic activity of the corresponding wild-type F protein.

[0181] In some embodiments, the F protein is a mutant F protein that is a functionally active fragment or a biologically active portion containing one or more amino acid mutations, such as one or more amino acid insertions, deletions, substitutions, or truncations. In some embodiments, the mutations described herein relate to amino acid insertions, deletions, substitutions, or truncations of amino acids compared to a reference F protein sequence. In some embodiments, the reference F protein sequence is the wild-type sequence of an F protein or a biologically active portion thereof. In some embodiments, the mutant F protein or the biologically active portion thereof is a mutant of a wild-type Hendra (Hev) virus F protein, a Nipah (NiV) virus F-protein, a Cedar (CedPV) virus F protein, a Mojiang virus F protein, or a bat Paramyxovirus F protein. In some embodiments, the wild-type F protein is encoded by a sequence of nucleotides that encodes any one of SEQ ID NO: 592, 593, 608, 614-616, or 641-644.

[0182] In some embodiments, the mutant F protein is a biologically active portion of a wild-type F protein that is an N-terminally and/or C-terminally truncated fragment. In some embodiments, the mutant F protein or the biologically active portion of a wild-type F protein thereof comprises one or more amino acid substitutions. In some embodiments, the mutations described herein improve transduction efficiency. In some embodiments, the mutations described herein increase fusogenic capacity. Exemplary mutations include any as described, see e.g. Khetawat and Broder 2010 Virology Journal 7:312; Witting et al. 2013 Gene Therapy 20:997-1005; published international; patent application No. WO/2013/148327.

[0183] In some embodiments, the mutant F protein is a biologically active portion that is truncated and lacks up to 20 contiguous amino acid residues at or near the C-terminus of the wild-type F protein, such as a wild-type F protein encoded by a sequence of nucleotides encoding the F protein set forth in any one of SEQ ID NOS: 592, 593, 608, or 614-616. In some embodiments, the mutant F protein is truncated and lacks up to 19 contiguous amino acids, such as up to 18, 17, 16, 15, 14, 13, 12, 11, 10, 9, 8, 7, 6, 5, 4, 3, 2, or 1 contiguous amino acid(s) at the C-terminus of the wild-type F protein.

[0184] In some embodiments, the F protein or the functionally active variant or biologically active portion thereof comprises an F1 subunit or a fusogenic portion thereof. In some embodiments, the F1 subunit is a proteolytically cleaved portion of the F0 precursor. In some embodiments, the F0 precursor is inactive. In some embodiments, the cleavage of the F0 precursor forms a disulfide-linked F1+F2 heterodimer. In some embodiments, the cleavage exposes the fusion polypeptide and produces a mature F protein. In some embodiments, the cleavage occurs at or around a single basic residue. In some embodiments, the cleavage occurs at Arginine 109 of NiV-F protein. In some embodiments, cleavage occurs at Lysine 109 of the Hendra virus F protein.

[0185] In some embodiments, the F protein is a wild-type Nipah virus F (NiV-F) protein or is a functionally active variant or biologically active portion thereof. In some embodiments, the F₀ precursor is encoded by a sequence of nucleotides encoding the sequence set forth in SEQ ID NO:9258. The encoding nucleic acid can encode a signal polypeptide sequence that has the sequence MVVILDKRCY CNLLILILMI SECSVG (SEQ ID NO:9291) or another signal polypeptide sequence. In some embodiments, the F protein has the sequence set forth in SEQ ID NO:9259. In some examples, the F protein is cleaved into an F1 subunit comprising the sequence set forth in SEQ ID NO:9261 and an F2 subunit comprising the sequence set forth in SEQ ID NO:9260.

[0186] In some embodiments, the F protein is a NiV-F protein that is encoded by a sequence of nucleotides encoding the sequence set forth in SEQ ID NO:9258, or is a functionally active variant or biologically active portion thereof that has an amino acid sequence having at least at or about 80%, at least at or about 81%, at least at or about 82%, at least at or about 83%, at least at or about 84%, at least at or about 85%, at least at or about 86%, at least at or about 87%, at least at or about 88%, at least at or about 89%, at least at or about 90%, at least at or about 91%, at least at or about 92%, at least at or about 93%, at least at or about 94%, at least at or about 95%, at least at or about 96%, at least at or about 97%, at least at or about 98%, or at least at or about 99% sequence identity to SEQ ID NO:9258. In some embodiments, the NiV-F-protein has the sequence of set forth in SEQ ID NO:9259, or is a functionally active variant or a biologically active portion thereof that has an amino acid sequence having at least at or about 80%, at least at or about 81%, at least at or about 82%, at least at or about 83%, at least at or about 84%, at least at or about 85%, at least at or about 86%, at least at or about 87%, at least at or about 88%, at least at or about 89%, at least at or about 90%, at least at or about 91%, at least at or about 92%, at least at or about 93%, at least at or about 94%, at least at or about 95%, at least at or about 96%, at least at or about 97%, at least at or about 98%, or at least at or about 99% sequence identity to SEQ ID NO:9259. In particular embodiments, the F protein or the functionally active variant or biologically active portion thereof retains the cleavage site cleaved by cathepsin L (e.g., corresponding to the cleavage site between amino acids 109-110 of SEQ ID NO:9258).

[0187] In some embodiments, the F protein or the functionally active variant or the biologically active portion thereof includes an F1 subunit that has the sequence set forth in SEQ ID NO:9261, or an amino acid sequence having, at least at or about 80%, at least at or about 81%, at least at or about 82%, at least at or about 83%, at least at or about 84%, at least at or about 85%, at least at or about 86%, at least at or about 87%, at least at or about 88%, at least at or about 89% at least at or about 90%, at least at or about 91%, at least at or about 92%, at least at or about 93%, at least at or about 94%, at least at or about 95%, at least at or about 96%, at least at or about 97%, at least at or about 98%, or at least at or about 99% sequence identity to SEQ ID NO:9261.

[0188] In some embodiments, the F protein or the functionally active variant or biologically active portion thereof includes an F2 subunit that has the sequence set forth in SEQ ID NO: 9260, or an amino acid sequence having, at least at or about 80%, at least at or about 81%, at least at or about 82%, at least at or about 83%, at least at or about 84%, at least at or about 85%, at least at or about 86%, at least at or about 87%, at least at or about 88%, at least at or about 89% at least at or about 90%, at least at or about 91%, at least at or about 92%, at least at or about 93%, at least at or about 94%, at least at or about 95%, at least at or about 96%, at least at or about 97%, at least at or about 98%, or at least at or about 99% sequence identity to SEQ ID NO: 9260.

[0189] In some embodiments, the F protein is a mutant NiV-F protein that is a biologically active portion thereof that is truncated and lacks up to 20 contiguous amino acid residues at or near the C-terminus of the wild-type NiV-F protein (e.g., set forth SEQ ID NO: 9259). In some embodiments, the mutant NiV-F protein comprises an amino acid sequence set forth in SEQ ID NO:9262. In some embodiments, the mutant NiV-F protein has a sequence that has at least at or about 90%, at least at or about 91%, at least at or about 92%, at least at or about 93%, at least at or about 94%, at least at or about 95%, at least at or about 96%, at least at or about 97%, at least at or about 98%, or at least at or about 99% sequence identity to SEQ ID NO:9262. In some embodiments, the mutant F protein contains an F1 protein that has the sequence set forth in SEQ ID NO:9263. In some embodiments, the mutant F protein has a sequence that has at least at or about 90%, at least at or about 91%, at least at or about 92%, at least at or about 93%, at least at or about 94%, at least at or about 95%, at least at or about 96%, at least at or about 97%, at least at or about 98%, or at least at or about 99% sequence identity to SEQ ID NO:9263.

[0190] In some embodiments, the F protein is a mutant NiV-F protein that is a biologically active portion thereof that comprises a 20 amino acid truncation at or near the C-terminus of the wild-type NiV-F protein (SEQ ID NO:9259); and a point mutation on an N-linked glycosylation site. In some embodiments, the mutant NiV-F protein comprises an amino acid sequence set forth in SEQ ID NO:9264. In some embodiments, the mutant NiV-F protein has a sequence that has at least at or about 90%, at least at or about 91%, at least at or about 92%, at least at or about 93%, at least at or about 94%, at least at or about 95%, at least at or about 96%, at least at or about 97%, at least at or about 98%, or at least at or about 99% sequence identity to SEQ ID NO:9264.

[0191] In some embodiments, the F protein is a mutant NiV-F protein that is a biologically active portion thereof that comprises a 22 amino acid truncation at or near the C-terminus of the wild-type NiV-F protein (SEQ ID NO:9259). In some embodiments, the NiV-F protein comprises an amino acid sequence set forth in SEQ ID NO:9265. In some embodiments, the NiV-F protein has a sequence with at least at or about 90%, at least at or about 91%, at least at or about 92%, at least at or about 93%, at least at or about 94%, at least at or about 95%, at least at or about 96%, at least at or about 97%, at least at or about 98%, or at least at or about 99% sequence identity to SEQ ID NO:9265. In particular embodiments, the variant F protein is a mutant Niv-F protein that has the sequence of amino acids set forth in SEQ ID NO:9280. In some embodiments, the NiV-F protein has a sequence with at least at or about 90%, at least at or about 91%, at least at or about 92%, at least at or about 93%, at least at or about 94%, at least at or about 95%, at least at or about 96%, at least at or about 97%, at least at or about 98%, or at least at or about 99% sequence identity to SEQ ID NO:9280.

[0192] It has been reported that the henipavirus F proteins from various species exhibit compatibility with G proteins from other species to trigger fusion (Brandel-Tretheway et al. Journal of Virology. 2019. 93(13):e00577-19). In some aspects of the provided lentiviral vector, the F protein is heterologous to the G protein, i.e. the F and G protein or biologically active portions are from different henipavirus species. For example, the G protein is from Hendra virus and the F protein is a NiV-F as described. In other aspects, the F and/or G protein can be a chimeric F and/or G protein containing regions of F and/or G proteins from different species of Henipavirus. In some embodiments, replacing a portion of the F protein with amino acids from a heterologous sequence of Henipavirus results in fusion to the G protein with the heteroglous sequence. (Brandel-Tretheway et al. 2019). In some cases, the chimeric F and/or G protein contains an extracellular domain from one henipavirus species and a transmembrane and/or cytoplasmic domain from a different henipavirus species. For example, the F protein contains an extracellular domain of Hendra virus and a transmembrane/cytoplasmic domain of Nipah virus.

### B. Lipid Bilayer

[0193] In some embodiments, the targeted lipid particle includes a naturally derived bilayer of amphipathic lipids that encloses a lumen or cavity. In some embodiments, the targeted lipid particle comprises a lipid bilayer as the outermost surface. In some embodiments, the lipid bilayer encloses a lumen. In some embodiments, the lumen is aqueous. In some embodiments, the lumen is in contact with the hydrophilic head groups on the interior of the lipid bilayer. In some embodiments, the lumen is a cytosol. In some embodiments, the cytosol contains cellular components present in a source cell. In some embodiments, the cytosol does not contain cellular components present in a source cell. In some embodiments, the lumen is a cavity. In some embodiments, the cavity contains an aqueous environment. In some embodiments, the cavity does not contain an aqueous environment.

[0194] In some aspects, the lipid bilayer is derived from a source cell during a process to produce a lipid-containing particle. In some embodiments, the lipid bilayer includes membrane components of the cell from which the lipid bilayer is produced, e.g., phospholipids, membrane proteins, etc. In some embodiments, the lipid bilayer includes a cytosol that includes components found in the cell from which the lipid bilayer is produced, e.g., solutes, proteins, nucleic acids, etc., but not all of the components of a cell, e.g., it lacks a nucleus. In some embodiments, the lipid bilayer is considered to be exosome-like. The lipid particle may vary in size, and in some instances have a diameter ranging from 30 and 300 nm, such as from 30 and 150 nm, and including from 40 to 100 nm.

[0195] In some embodiments, the lipid bilayer is a viral envelope. In some embodiments, the viral envelope is obtained from a source cell. In some embodiments, the viral envelope is obtained from the source cell plasma membrane. In some embodiments, the lipid bilayer is obtained from a membrane other than the plasma membrane of a host cell. In some embodiments, the viral envelope lipid bilayer is embedded with viral proteins, including viral glycoproteins.

[0196] In other aspects, the lipid bilayer includes synthetic lipid complex. In some embodiments, the lipid bilayer is a liposome that includes a synthetic lipid complex. In some embodiments, the lipid particle is a vesicular structure characterized by a phospholipid bilayer membrane and an inner aqueous medium. In some embodiments, the lipid bilayer has multiple lipid layers separated by aqueous medium. In some embodiments, the lipid bilayer forms spontaneously when phospholipids are suspended in an excess of aqueous solution. In some examples, the lipid components undergo self-rearrangement before the formation of closed structures and entrap water and dissolved solutes between the lipid bilayers. In some embodiments the lipid bilayer is a fusosome.

[0197] In some embodiments, a targeted envelope protein and fusogen, such as any described above including any that are exogenous or overexpressed relative to the source cell, is disposed in the lipid bilayer.

[0198] In some embodiments, the targeted lipid particle comprises several different types of lipids. In some embodiments, the lipids are amphipathic lipids. In some embodiments, the amphipathic lipids are phospholipids. In some embodiments, the phospholipids comprise phosphatidylcholine, phosphatidylethanolamine, phosphatidylinositol, and phosphatidylserine. In some embodiments, the lipids comprise DMPC, DOPC, and DSPC.

[0199] In some embodiments, the bilayer is comprised of one or more lipids of the same or different type. In some embodiments, the source cell comprises a cell selected from CHO cells, BHK cells, MDCK cells, C3H 10T1/2 cells, FLY cells, Psi-2 cells, BOSC 23 cells, PA317 cells, WEHI cells, COS cells, BSC 1 cells, BSC 40 cells, BMT 10 cells, VERO cells, W138 cells, MRC5 cells, A549 cells, HT1080 cells, 293 cells, 293T cells, B-50 cells, 3T3 cells, NIH3T3 cells, HepG2 cells, Saos-2 cells, Huh7 cells, Hela cells, W163 cells, 211 cells, and 211A cells.

### C. Exogenous Agent

[0200] In some embodiments, the targeted lipid particle further comprises an agent that is exogenous relative to the source cell (also referred to herein as a “cargo” or “payload”). In some embodiments, the exogenous agent is a small molecule, a protein, or a nucleic acid (e.g., a DNA, a chromosome (e.g. a human artificial chromosome), an RNA, e.g., an mRNA or miRNA). In some embodiments, the exogenous agent or cargo encodes a cytosolic protein. In some embodiments the exogenous agent or cargo comprises or encodes a membrane protein. In some embodiments, the exogenous agent or cargo comprises a therapeutic agent. In some embodiments, the therapeutic agent is chosen from one or more of a protein, e.g., an enzyme, a transmembrane protein, a receptor, an antibody; a nucleic acid, e.g., DNA, a chromosome (e.g. a human artificial chromosome), RNA, mRNA, siRNA, miRNA; or a small molecule.

[0201] In some embodiments, the exogenous agent is present in at least, or no more than, 10, 20, 50, 100, 200, 500, 1,000, 2,000, 5,000, 10,000, 20,000, 50,000, 100,000, 200,000, 500,000, 1,000,000, 5,000,000, 10,000,000, 50,000,000, 100,000,000, 500,000,000, or 1,000,000,000 copies. In some embodiments, the targeted lipid particle has an altered, e.g., increased or decreased level of one or more endogenous molecules, e.g., protein or nucleic acid (e.g., in some embodiments, endogenous relative to the source cell, and in some embodiments, endogenous relative to the target cell), e.g., due to treatment of the source cell, e.g., mammalian source cell with a siRNA or gene editing enzyme. In some embodiments, the endogenous molecule is present in at least, or no more than, 10, 20, 50, 100, 200, 500, 1,000, 2,000, 5,000, 10,000, 20,000, 50,000, 100,000, 200,000, 500,000, 1,000,000, 5,000,000, 10,000,000, 50,000,000, 100,000,000, 500,000,000, or 1,000,000,000 copies. In some embodiments, the endogenous molecule (e.g., an RNA or protein) is present at a concentration of at least 1, 2, 3, 4, 5, 10, 20, 50, 100, 500, 10³, 5.0×10³, 10⁴, 5.0×10⁴, 10⁵, 5.0×10⁵, 10⁶, 5.0×10⁶, 1.0×10⁷, 5.0×10⁷, or 1.0×10⁸, greater than its concentration in the source cell. In some embodiments, the endogenous molecule (e.g., an RNA or protein) is present at a concentration of at least 1, 2, 3, 4, 5, 10, 20, 50, 100, 500, 10³, 5.0×10³, 10⁴, 5.0×10⁴, 10⁵, 5.0×10⁵, 10⁶, 5.0×10⁶, 1.0×10⁷, 5.0×10⁷, or 1.0×10⁸ less than its concentration in the source cell.

[0202] In some embodiments, the targeted lipid particle (e.g., targeted viral vector) delivers to a target cell at least 10%, 20%, 30%, 40%, 50%, 60%, 70%, 80%, 90%, 95%, 96%, 97%, 98%, or 99% of the cargo (e.g., a therapeutic agent, e.g., an exogenous therapeutic agent) comprised by the targeted lipid particle. In some embodiments, the targeted lipid particle that fuses with the target cell(s) delivers to the target cell an average of at least 10%, 20%, 30%, 40%, 50%, 60%, 70%, 80%, 90%, 95%, 96%, 97%, 98%, or 99% of the cargo (e.g., a therapeutic agent, e.g., an exogenous therapeutic agent) comprised by the targeted lipid particle that fuses with the target cell(s). In some embodiments, the targeted lipid particle composition delivers to a target tissue at least 10%, 20%, 30%, 40%, 50%, 60%, 70%, 80%, 90%, 95%, 96%, 97%, 98%, or 99% of the cargo (e.g., a therapeutic agent, e.g., an exogenous therapeutic agent) comprised by the targeted lipid particle composition.

[0203] In some embodiments, the exogenous agent or cargo is not expressed naturally in the cell from which the targeted lipid particle is derived. In some embodiments, the exogenous agent or cargo is expressed naturally in the cell from which the viral vector is derived. In some embodiments, the exogenous agent or cargo is loaded into the targeted lipid particle via expression in the cell from which the viral vector is derived (e.g. expression from DNA or mRNA introduced via transfection, transduction, or electroporation). In some embodiments, the exogenous agent or cargo is expressed from DNA integrated into the genome or maintained episomally. In some embodiments, expression of the exogenous agent or cargo is constitutive. In some embodiments, expression of the exogenous agent or cargo is induced. In some embodiments, expression of the exogenous agent or cargo is induced immediately prior to generating the targeted lipid particle. In some embodiments, expression of the exogenous agent or cargo is induced at the same time as expression of the fusogen.

[0204] In some embodiments, the exogenous agent or cargo is loaded into the viral vector via electroporation into the viral vector itself or into the cell from which the viral vector is derived. In some embodiments, the exogenous agent or cargo is loaded into the viral vector via transfection (e.g., of a DNA or mRNA encoding the cargo) into the viral vector itself or into the cell from which the viral vector is derived.

[0205] In some embodiments, the exogenous agent or cargo includes one or more nucleic acid sequences, one or more amino acid sequences, a combination of nucleic acid sequences and/or amino acid sequences, one or more organelles, and any combination thereof. In some embodiments, the exogenous agent or cargo includes one or more cellular components. In some embodiments, the exogenous agent or cargo includes one or more cytosolic and/or nuclear components.

[0206] In some embodiments, the exogenous agent or cargo includes a nucleic acid, e.g., DNA, nDNA (nuclear DNA), mtDNA (mitochondrial DNA), protein coding DNA, gene, operon, chromosome, genome, transposon, retrotransposon, viral genome, intron, exon, modified DNA, mRNA (messenger RNA), tRNA (transfer RNA), modified RNA, microRNA, siRNA (small interfering RNA), tmRNA (transfer messenger RNA), rRNA (ribosomal RNA), mtRNA (mitochondrial RNA), snRNA (small nuclear RNA), small nucleolar RNA (snoRNA), SmY RNA (mRNA trans-splicing RNA), gRNA (guide RNA), TERC (telomerase RNA component), aRNA (antisense RNA), cis-NAT (Cis-natural antisense transcript), CRISPR RNA (crRNA), lncRNA (long noncoding RNA), piRNA (piwi-interacting RNA), shRNA (short hairpin RNA), tasiRNA (trans-acting siRNA), eRNA (enhancer RNA), satellite RNA, pcRNA (protein coding RNA), dsRNA (double stranded RNA), RNAi (interfering RNA), circRNA (circular RNA), reprogramming RNAs, aptamers, and any combination thereof. In some embodiments, the nucleic acid is a wild-type nucleic acid. In some embodiments, the nucleic acid is a mutant nucleic acid. In some embodiments the nucleic acid is a fusion or chimera of multiple nucleic acid sequences.

[0207] In some embodiments, the exogenous agent or cargo includes a nucleic acid. For example, the exogenous agent or cargo may comprise RNA to enhance expression of an endogenous protein, or a siRNA or miRNA that inhibits protein expression of an endogenous protein. For example, the endogenous protein may modulate structure or function in the target cells. In some embodiments, the cargo includes a nucleic acid encoding an engineered protein that modulates structure or function in the target cells. In some embodiments, the exogenous agent or cargo is a nucleic acid that targets a transcriptional activator that modulate structure or function in the target cells.

[0208] In some embodiments, the exogenous agent or cargo includes a polypeptide, e.g., enzymes, structural proteins, signaling proteins, regulatory proteins, transport proteins, sensory proteins, motor proteins, defense proteins, storage proteins, transcription factors, antibodies, cytokines, hormones, catabolic proteins, anabolic proteins, proteolytic proteins, metabolic proteins, kinases, transferases, hydrolases, lyases, isomerases, ligases, enzyme modulator proteins, protein binding polypeptides, lipid binding proteins, membrane fusion proteins, cell differentiation proteins, epigenetic proteins, cell death proteins, nuclear transport proteins, nucleic acid binding proteins, reprogramming proteins, DNA editing proteins, DNA repair proteins, DNA recombination proteins, transposase proteins, DNA integration proteins, targeted endonucleases (e.g. Zinc-finger nucleases, transcription-activator-like nucleases (TALENs), cas9 and homologs thereof), recombinases, and any combination thereof. In some embodiments the protein targets a protein in the cell for degradation. In some embodiments the protein targets a protein in the cell for degradation by localizing the protein to the proteasome. In some embodiments, the protein is a wild-type protein. In some embodiments, the protein is a mutant protein. In some embodiments the protein is a fusion or chimeric protein.

[0209] In some embodiments, the exogenous agent or cargo includes a small molecule, e.g., ions (e.g. Ca²⁺, C1−, Fe²⁺), carbohydrates, lipids, reactive oxygen species, reactive nitrogen species, isoprenoids, signaling molecules, heme, peptide cofactors, electron accepting compounds, electron donating compounds, metabolites, ligands, and any combination thereof. In some embodiments the small molecule is a pharmaceutical that interacts with a target in the cell. In some embodiments the small molecule targets a protein in the cell for degradation. In some embodiments the small molecule targets a protein in the cell for degradation by localizing the protein to the proteasome. In some embodiments that small molecule is a proteolysis targeting chimera molecule (PROTAC).

[0210] In some embodiments, the exogenous agent or cargo includes a mixture of proteins, nucleic acids, or metabolites, e.g., multiple amino acids, multiple nucleic acids, multiple small molecules; combinations of nucleic acids, amino acids, and small molecules; ribonucleoprotein complexes (e.g. Cas9-gRNA complex); multiple transcription factors, multiple epigenetic factors, reprogramming factors (e.g. Oct4, Sox2, cMyc, and Klf4); multiple regulatory RNAs; and any combination thereof.

[0211] In some embodiments, the exogenous agent or cargo includes one or more organelles, e.g., chondriosomes, mitochondria, lysosomes, nucleus, cell membrane, cytoplasm, endoplasmic reticulum, ribosomes, vacuoles, endosomes, spliceosomes, polymerases, capsids, acrosome, autophagosome, centriole, glycosome, glyoxysome, hydrogenosome, melanosome, mitosome, myofibril, cnidocyte, peroxisome, proteasome, vesicle, stress granule, networks of organelles, and any combination thereof.

[0212] In some embodiments, the exogenous agent encodes a therapeutic agent or a diagnostic agent. In some embodiments, the therapeutic agent is a chimeric antigen receptor (CAR) or T-cell receptor (TCR). In some embodiments, the CAR targets a tumor antigen selected from CD19, CD20, CD22, or BCMA. In another embodiment, the CAR is engineered to comprise an intracellular signaling domain of the T cell antigen receptor complex zeta chain (e.g., CD3 zeta). In a preferred embodiment, the intracellular domain is selected from a CD137 (4-1BB) signaling domain, a CD28 signaling domain, and a CD3zeta signaling domain.

D. Methods of Generating Targeted Lipid Particles Derived from Virus

[0213] Provided herein are targeted lipid particles that are derived from virus, such as viral particles or virus-like particles, including those derived from retroviruses or lentiviruses. In some embodiments, the targeted lipid particle's bilayer of amphipathic lipids is or comprises the viral envelope. In some embodiments, the targeted lipid particle's bilayer of amphipathic lipids is or comprises lipids derived from a producer cell. In some embodiments, the viral envelope comprises a fusogen, e.g., a fusogen that is endogenous to the virus or a pseudotyped fusogen. In some embodiments, the targeted lipid particle's lumen or cavity comprises a viral nucleic acid, e.g., a retroviral nucleic acid, e.g., a lentiviral nucleic acid. In some embodiments, the viral nucleic acid is a viral genome. In some embodiments, the targeted lipid particle further comprises one or more viral non-structural proteins, e.g., in its cavity or lumen. In some embodiments, the targeted lipid particle is or comprises a virus-like particle (VLP). In some embodiments, the VLP does not comprise an envelope. In some embodiments, the VLP comprises an envelope.

[0214] In some embodiments, the viral particle or virus-like particle, such as a retrovirus or retrovirus-like particle, comprises one or more of a Gag polyprotein, polymerase (e.g., Pol), integrase (IN, e.g., a functional or non-functional variant), protease (PR), and a fusogen. In some embodiments, the targeted lipid particle further comprises Rev. In some embodiments, one or more of the aforesaid proteins are encoded in the retroviral genome, and in some embodiments, one or more of the aforesaid proteins are provided in trans, e.g., by a helper cell, helper virus, or helper plasmid. In some embodiments, the targeted lipid particle nucleic acid (e.g., retroviral nucleic acid) comprises one or more of the following nucleic acid sequences: 5′ LTR (e.g., comprising U5 and lacking a functional U3 domain), Psi packaging element (Psi), Central polypurine tract (cPPT) Promoter operatively linked to the payload gene, payload gene (optionally comprising an intron before the open reading frame), Poly A tail sequence, WPRE, and 3′ LTR (e.g., comprising U5 and lacking a functional U3). In some embodiments the targeted lipid particle nucleic acid further comprises one or more insulator elements. In some embodiments, the recognition sites are situated between the poly A tail sequence and the WPRE.

[0215] In some embodiments, the targeted lipid particle comprises supramolecular complexes formed by viral proteins that self-assemble into capsids. In some embodiments, the targeted lipid particle is a viral particle or virus-like particle derived from viral capsids. In some embodiments, the targeted lipid particle is a viral particle or virus-like particle derived from viral nucleocapsids. In some embodiments, the targeted lipid particle comprises nucleocapsid-derived proteins that retain the property of packaging nucleic acids. In some embodiments, the viral particles or virus-like particles comprise only viral structural glycoproteins. In some embodiments, the targeted lipid particle does not contain a viral genome.

[0216] In some embodiments, the targeted lipid particle packages nucleic acids from host cells during the expression process. In some embodiments, the nucleic acids do not encode any genes involved in virus replication. In particular embodiments, the targeted lipid particle is a virus-like particle, e.g. retrovirus-like particle such as a lentivirus-like particle, that is replication defective.

[0217] In some cases, the targeted lipid particle is a viral particle that is morphologically indistinguishable from the wild type infectious virus. In some embodiments, the viral particle presents the entire viral proteome as an antigen. In some embodiments, the viral particle presents only a portion of the proteome as an antigen.

[0218] In some embodiments, the viral particle or virus-like particle is produced utilizing proteins (e.g., envelope proteins) from a virus within the Paramyxoviridae family. In some embodiments, the Paramyxoviridae family comprises members within the Henipavirus genus. In some embodiments, the Henipavirus is or comprises a Hendra (HeV) or a Nipah (NiV) virus. In particular embodiments, the viral particles or virus-like particles incorporate a targeted envelope protein and fusogen.

[0219] In some embodiments, viral particles or virus-like particles is produced in multiple cell culture systems including bacteria, mammalian cell lines, insect cell lines, yeast, and plant cells.

[0220] Suitable cell lines which can be used include, for example, CHO cells, BHK cells, MDCK cells, C3H 10T1/2 cells, FLY cells, Psi-2 cells, BOSC 23 cells, PA317 cells, WEHI cells, COS cells, BSC 1 cells, BSC 40 cells, BMT 10 cells, VERO cells, W138 cells, MRC5 cells, A549 cells, HT1080 cells, 293 cells, 293T cells, B-50 cells, 3T3 cells, NIH3T3 cells, HepG2 cells, Saos-2 cells, Huh7 cells, Hela cells, W163 cells, 211 cells, 211A cells, and cyno and Macaca nemestrina cell lines. In embodiments, the packaging cells are 293 cells, 293T cells, or A549 cells.

[0221] In some embodiments, a source cell line includes a cell line which is capable of producing recombinant retroviral particles, comprising a producer cell line and a transfer vector construct comprising a packaging signal. Methods of preparing viral stock solutions are illustrated by, e.g., Y. Soneoka et al. (1995) Nucl. Acids Res. 23:628-633, and N. R. Landau et al. (1992) J. Virol. 66:5110-5113, which are incorporated herein by reference.

[0222] In some embodiments, the assembly of a viral particle or virus-like particle is initiated by binding of the core protein to a unique encapsidation sequence within the viral genome (e.g. UTR with stem-loop structure). In some embodiments, the interaction of the core with the encapsidation sequence facilitates oligomerization.

[0223] In some embodiments, the targeted lipid particle is a virus-like particle which comprises a sequence that is devoid of or lacking viral RNA. In some embodiments, such particles are the result of removing or eliminating the viral RNA from the sequence. In some embodiments, this is achieved by using an endogenous packaging signal binding site on Gag. In some embodiments, the endogenous packaging signal binding site is on Pol. In some embodiments, the RNA which is to be delivered will contain a cognate packaging signal. In some embodiments, a heterologous binding domain (which is heterologous to Gag) located on the RNA to be delivered, and a cognate binding site located on Gag or Pol, is used to ensure packaging of the RNA to be delivered. In some embodiments, the heterologous sequence is non-viral or it could be viral, in which case it is derived from the same virus or a different virus. In some embodiments, the vector particles could be used to deliver therapeutic RNA, in which case functional integrase and/or reverse transcriptase is not required. In some embodiments, the vector particles could also be used to deliver a therapeutic gene of interest, in which case Pol is typically included. In some embodiments, the retroviral nucleic acid comprises one or more of (e.g., all of): a 5′ promoter (e.g., to control expression of the entire packaged RNA), a 5′ LTR (e.g., that includes R (polyadenylation tail signal) and/or U5 which includes a primer activation signal), a primer binding site, a Psi packaging signal, a RRE element for nuclear export, a promoter directly upstream of the transgene to control transgene expression, a transgene (or other exogenous agent element), a polypurine tract, and a 3′ LTR (e.g., that includes a mutated U3, a R, and U5). In some embodiments, the retroviral nucleic acid further comprises one or more of a cPPT, a WPRE, and/or an insulator element.

[0224] A retrovirus typically replicates by reverse transcription of its genomic RNA into a linear double-stranded DNA copy and subsequently covalently integrates its genomic DNA into a host genome. Illustrative retroviruses suitable for use in particular embodiments, include, but are not limited to: Moloney murine leukemia virus (M-MuLV), Moloney murine sarcoma virus (MOMSV), Harvey murine sarcoma virus (HaMuSV), murine mammary tumor virus (MuMTV), gibbon ape leukemia virus (GaLV), feline leukemia virus (FLV), spumavirus, Friend murine leukemia virus, Murine Stem Cell Virus (MSCV), Rous Sarcoma Virus (RSV), and other lentiviruses.

[0225] In some embodiments the retrovirus is a Gammaretrovirus. In some embodiments the retrovirus is an Epsilonretrovirus. In some embodiments the retrovirus is an Alpharetrovirus. In some embodiments the retrovirus is a Betaretrovirus. In some embodiments the retrovirus is a Deltaretrovirus. In some embodiments the retrovirus is a Lentivirus. In some embodiments the retrovirus is a Spumaretrovirus. In some embodiments the retrovirus is an endogenous retrovirus.

[0226] Illustrative lentiviruses include, but are not limited to: HIV (human immunodeficiency virus; including HIV type 1, and HIV type 2); visna-maedi virus (VMV) virus; the caprine arthritis-encephalitis virus (CAEV); equine infectious anemia virus (EIAV); feline immunodeficiency virus (FIV); bovine immune deficiency virus (BIV); and simian immunodeficiency virus (SIV). In some embodiments, HIV based vector backbones (i.e., HIV cis-acting sequence elements) are used.

[0227] In some embodiments, a vector herein is a nucleic acid molecule capable transferring or transporting another nucleic acid molecule. The transferred nucleic acid is generally linked to, e.g., inserted into, the vector nucleic acid molecule. A vector may include sequences that direct autonomous replication in a cell, or may include sequences sufficient to allow integration into host cell DNA. Useful vectors include, for example, plasmids (e.g., DNA plasmids or RNA plasmids), transposons, cosmids, bacterial artificial chromosomes, and viral vectors. Useful viral vectors include, e.g., replication defective retroviruses and lentiviruses.

[0228] In some embodiments, a viral vector comprises a nucleic acid molecule (e.g., a transfer plasmid) that includes virus-derived nucleic acid elements that typically facilitate transfer of the nucleic acid molecule or integration into the genome of a cell or to a viral particle that mediates nucleic acid transfer. Viral particles will typically include various viral components and sometimes also host cell components in addition to nucleic acid(s). In some embodiments, a viral vector comprises e.g., a virus or viral particle capable of transferring a nucleic acid into a cell, or the transferred nucleic acid (e.g., as naked DNA). In some embodiments, a viral vectors and transfer plasmids comprise structural and/or functional genetic elements that are primarily derived from a virus. A retroviral vector can comprise a viral vector or plasmid containing structural and functional genetic elements, or portions thereof, that are primarily derived from a retrovirus. A lentiviral vector can comprise a viral vector or plasmid containing structural and functional genetic elements, or portions thereof, including LTRs that are primarily derived from a lentivirus.

[0229] In embodiments, a lentiviral vector (e.g., lentiviral expression vector) comprises a lentiviral transfer plasmid (e.g., as naked DNA) or an infectious lentiviral particle. With respect to elements such as cloning sites, promoters, regulatory elements, heterologous nucleic acids, etc., it is to be understood that the sequences of these elements can be present in RNA form in lentiviral particles and can be present in DNA form in DNA plasmids.

[0230] In some embodiments, the viral vector further comprises a vector-surface targeting moiety which specifically binds to a target ligand. In some embodiments, the vector-surface targeting moiety is a polypeptide. In some embodiments, a nucleic acid encoding the Paramyxovirus envelope protein (e.g. G protein) is modified with a targeting moiety to specifically bind to a target molecule on a target cells. In some embodiments, the targeting moiety is any targeting protein, including but not necessarily limited to antibodies and antigen binding fragments thereof.

[0231] In some embodiments, in the vectors described herein at least part of one or more protein coding regions that contribute to or are essential for replication are absent compared to the corresponding wild-type virus. In some embodiments, the viral vector is replication-defective. In some embodiments, the vector is capable of transducing a target non-dividing host cell and/or integrating its genome into a host genome.

[0232] In some embodiments, different cells differ in their usage of particular codons. In some embodiments, this codon bias corresponds to a bias in the relative abundance of particular tRNAs in the cell type. In some embodiments, by altering the codons in the sequence so that they are tailored to match with the relative abundance of corresponding tRNAs, it is possible to increase expression. In some embodiments, it is possible to decrease expression by deliberately choosing codons for which the corresponding tRNAs are known to be rare in the particular cell type. In some embodiments, an additional degree of translational control is available. An additional description of codon optimization is found, e.g., in WO 99/41397, which is herein incorporated by reference in its entirety.

[0233] Conventional techniques for generating retrovirus vectors (and, in particular, lentivirus vectors) with or without the use of packaging/helper vectors are known to those skilled in the art and may be used to generate targeted lipid particles according to the present disclosure. (See, e.g., Derse and Newbold 1993 Virology 194:530-6; Maury et al. 1994 Virology 200:632-42; Wanisch et al. 2009. Mol Ther. 1798:1316-1332; Martarano et al. 1994 J. Virol. 68:3102-11; Naldini et al., (1996a, 1996b, and 1998); Zufferey et al., 1999, J. Virol., 73:2886; Huang et al., Mol. Cell. Biol., 5:3864; Liu et al., 1995, Genes Dev., 9:1766; Cullen et al., 1991. J. Virol. 65:1053; and Cullen et al., 1991. Cell 58:423; Dull et al., 1998, U.S. Pat. Nos. 6,013,516; and 5,994,136; PCT patent applications WO 99/15683, WO 98/17815, WO 99/32646, and WO 01/79518). Conventional techniques relating to packaging vectors and producer cells known in the art may also be used according to the present disclosure. (See, e.g., Yao et al, 1998; Jones et al, 2005.)

[0234] Provided herein are targeted lipid particles that comprise a naturally derived membrane. In some embodiments, the naturally derived membrane comprises membrane vesicles prepared from cells or tissues. In some embodiments, the targeted lipid particle comprises a vesicle that is obtainable from a cell. In some embodiments, the targeted lipid particle comprises a microvesicle, an exosome, a membrane enclosed body, an apoptotic body (from apoptotic cells), a particle (which may be derived from e.g. platelets), an ectosome (derivable from, e.g., neutrophiles and monocytes in serum), a prostatosome (obtainable from prostate cancer cells), or a cardiosome (derivable from cardiac cells).

[0235] In some embodiments, the source cell is an endothelial cell, a fibroblast, a blood cell (e.g., a macrophage, a neutrophil, a granulocyte, a leukocyte), a stem cell (e.g., a mesenchymal stem cell, an umbilical cord stem cell, bone marrow stem cell, a hematopoietic stem cell, an induced pluripotent stem cell e.g., an induced pluripotent stem cell derived from a subject's cells), an embryonic stem cell (e.g., a stem cell from embryonic yolk sac, placenta, umbilical cord, fetal skin, adolescent skin, blood, bone marrow, adipose tissue, erythropoietic tissue, hematopoietic tissue), a myoblast, a parenchymal cell (e.g., hepatocyte), an alveolar cell, a neuron (e.g., a retinal neuronal cell), a precursor cell (e.g., a retinal precursor cell, a myeloblast, myeloid precursor cells, a thymocyte, a meiocyte, a megakaryoblast, a promegakaryoblast, a melanoblast, a lymphoblast, a bone marrow precursor cell, a normoblast, or an angioblast), a progenitor cell (e.g., a cardiac progenitor cell, a satellite cell, a radial glial cell, a bone marrow stromal cell, a pancreatic progenitor cell, an endothelial progenitor cell, a blast cell), or an immortalized cell (e.g., HeEa, HEK293, HFF-I, MRC-5, WI-38, IMR 90, IMR 91, PER.C6, HT-1080, or BJ cell). In some embodiments, the source cell is other than a 293 cell, HEK cell, human endothelial cell, or a human epithelial cell, monocyte, macrophage, dendritic cell, or stem cell.

[0236] In some embodiments, the targeted lipid particle has a density of <1, 1-1.1, 1.05-1.15, 1.1-1.2, 1.15-1.25, 1.2-1.3, 1.25-1.35, or >1.35 g/ml. In some embodiments, the targeted lipid particle composition comprises less than 0.01%, 0.05%, 0.1%, 0.5%, 1%, 1.5%, 2%, 2.5%, 3%, 4%, 5%, or 10% source cells by protein mass, or less than 0.01%, 0.05%, 0.1%, 0.5%, 1%, 1.5%, 2%, 2.5%, 3%, 4%, 5%, or 10% of cells having a functional nucleus.

[0237] In embodiments, the targeted lipid particle has a size, or the population of targeted lipid particles have an average size, that is less than about 0.01%, 0.05%, 0.1%, 0.5%, 1%, 2%, 3%, 4%, 5%, 10%, 20%, 30%, 40%, 50%, 60%, 70%, 80%, 90%, of that of the source cell.

[0238] In some embodiments the targeted lipid particle comprises an extracellular vesicle, e.g., a cell-derived vesicle comprising a membrane that encloses an internal space and has a smaller diameter than the cell from which it is derived. In embodiments the extracellular vesicle has a diameter from 20 nm to 1000 nm. In embodiments the targeted lipid particle comprises an apoptotic body, a fragment of a cell, a vesicle derived from a cell by direct or indirect manipulation, a vesiculated organelle, and a vesicle produced by a living cell (e.g., by direct plasma membrane budding or fusion of the late endosome with the plasma membrane). In embodiments the extracellular vesicle is derived from a living or dead organism, explanted tissues or organs, or cultured cells.

[0239] In embodiments, the targeted lipid particle comprises a nanovesicle, e.g., a cell-derived small (e.g., from 20 to 250 nm in diameter, or from 30 to 150 nm in diameter) vesicle comprising a membrane that encloses an internal space, and which is generated from said cell by direct or indirect manipulation. The production of nanovesicles can, in some instances, result in the destruction of the source cell. The nanovesicle may comprise a lipid or fatty acid and a polypeptide.

[0240] In embodiments, the targeted lipid particle comprises an exosome. In embodiments, the exosome is a cell-derived small (e.g., from 20 to 300 nm in diameter, or from 40 to 200 nm in diameter) vesicle comprising a membrane that encloses an internal space, and which is generated from said cell by direct plasma membrane budding or by fusion of the late endosome with the plasma membrane. In embodiments, production of exosomes does not result in the destruction of the source cell. In embodiments, the exosome comprises a lipid or fatty acid and a polypeptide.

[0241] In some embodiments, the targeted lipid particle is derived from a source cell with a genetic modification which results in increased expression of an immunomodulatory agent. In some embodiments, the immunosuppressive agent is on an exterior surface of the cell. In some embodiments, the immunosuppressive agent is incorporated into the exterior surface of the targeted lipid particle. In some embodiments, the targeted lipid particle comprises an immunomodulatory agent attached to the surface of the solid particle by a covalent or non-covalent bond.

### A. Generation of Cell-Derived Particles

[0242] In some embodiments, targeted lipid particles are generated by inducing budding of an exosome, microvesicle, membrane vesicle, extracellular membrane vesicle, plasma membrane vesicle, giant plasma membrane vesicle, apoptotic body, mitoparticle, pyrenocyte, lysosome, or other membrane enclosed vesicle.

[0243] In some embodiments, targeted lipid particles are generated by inducing cell enucleation. Enucleation may be performed using assays such as genetic, chemical (e.g., using Actinomycin D, see Bayona-Bafaluy et al., “A chemical enucleation method for the transfer of mitochondrial DNA to p° cells” Nucleic Acids Res. 2003 Aug. 15; 31(16):e98), or mechanical methods (e.g., squeezing or aspiration, see Lee et al., “A comparative study on the efficiency of two enucleation methods in pig somatic cell nuclear transfer: effects of the squeezing and the aspiration methods.” Anim Biotechnol. 2008; 19(2):71-9), or combinations thereof.

[0244] In some embodiments, the targeted lipid particles are generated by inducing cell fragmentation. In some embodiments, cell fragmentation is performed using the following methods, including, but not limited to: chemical methods, mechanical methods (e.g., centrifugation (e.g., ultracentrifugation, or density centrifugation), freeze-thaw, or sonication), or combinations thereof.

[0245] In some embodiments, the targeted lipid particle is a microvesicle. In some embodiments the microvesicle has a diameter of about 100 nm to about 2000 nm. In some embodiments, a targeted lipid particle comprises a cell ghost. In some embodiments, a vesicle is a plasma membrane vesicle, e.g., a giant plasma membrane vesicle.

[0246] In some embodiments, a characteristic of a targeted lipid particle is described by comparison to a reference cell. In embodiments, the reference cell is the source cell. In embodiments, the reference cell is a HeLa, HEK293, HFF-1, MRC-5, WI-38, IMR 90, IMR 91, PER.C6, HT-1080, or BJ cell. In some embodiments, for example when the source cell used to make the targeted lipid particle is not available for testing after the targeted lipid particle is made, a characteristic of a population of targeted lipid particle is described by comparison to a population of reference cells, e.g., a population of source cells, or a population of HeLa, HEK293, HFF-1, MRC-5, WI-38, IMR 90, IMR 91, PER.C6, HT-1080, or BJ cells.

### Pharmaceutical Compositions

[0247] The present disclosure also provides, in some aspects, a pharmaceutical composition comprising the targeted lipid particle (e.g., targeted viral vectors) composition described herein and a pharmaceutically acceptable carrier. The pharmaceutical compositions can include any of the described targeted lipid particles.

[0248] In some embodiments, the targeted lipid particle meets a pharmaceutical or good manufacturing practices (GMP) standard. In some embodiments, the targeted lipid particle is made according to good manufacturing practices (GMP). In some embodiments, the targeted lipid particle has a pathogen level below a predetermined reference value, e.g., is substantially free of pathogens. In some embodiments, the targeted lipid particle has a contaminant level below a predetermined reference value, e.g., is substantially free of contaminants. In some embodiments, the targeted lipid particle has low immunogenicity.

[0249] In some embodiments, provided herein are the use of pharmaceutical compositions to practice the methods of the disclosure. Such a pharmaceutical composition may comprise at least one targeted lipid particle of the disclosure in a form suitable for administration to a subject, or the pharmaceutical composition may comprise at least one targeted lipid particle of the disclosure and one or more pharmaceutically acceptable carriers, one or more additional ingredients, or some combination of these.

[0250] In some embodiments, the relative amounts of the targeted lipid particle, the pharmaceutically acceptable carrier, and any additional ingredients in a pharmaceutical composition of the disclosure will vary, depending upon the identity, size, and condition of the subject treated and further depending upon the route by which the composition is to be administered. In some embodiments, the composition comprises from 0.1% to 100% (w/w) of the targeted lipid particles of the disclosure.

[0251] In some embodiments, pharmaceutical compositions that are useful in the methods of the disclosure are suitably developed for intravenous, intratumoral, oral, rectal, vaginal, parenteral, topical, pulmonary, intranasal, buccal, ophthalmic, or another route of administration. In some embodiments, a composition useful within the methods of the disclosure are directly administered to the skin, vagina or any other tissue of a mammal. In some embodiments, formulations include liposomal preparations, resealed erythrocytes containing the targeted lipid particles of the disclosure, and immunologically based formulations. In some embodiments, the route(s) of administration will be readily apparent to the skilled artisan and will depend upon any number of factors including the type and severity of the disease being treated, the type and age of the veterinary or human subject being treated, and the like.

[0252] In some embodiments, formulations of the pharmaceutical compositions described herein are prepared by any method known or hereafter developed in the art of pharmacology. In some embodiments, preparatory methods include the step of bringing the targeted lipid particles of the disclosure into association with a carrier or one or more other accessory ingredients, and then, if necessary or desirable, shaping or packaging the product into a desired single- or multi-dose unit.

[0253] In some embodiments, a “unit dose” is a discrete amount of the pharmaceutical composition comprising a predetermined amount of the targeted lipid particles of the disclosure. In some embodiments, the amount is generally equal to the dosage that would be administered to a subject or a convenient fraction of such a dosage such as, for example, one-half or one-third of such a dosage. In some embodiments, the unit dosage form is for a single daily dose or one of multiple daily doses (e.g., about 1 to 4 or more times per day). In some embodiments, when multiple daily doses are used, the unit dosage form is the same or different for each dose.

[0254] In some embodiments, although the descriptions of pharmaceutical compositions provided herein are principally directed to pharmaceutical compositions that are suitable for ethical administration to humans, it will be understood by the skilled artisan that such compositions are generally suitable for administration to animals of all sorts. In some embodiments, modification of pharmaceutical compositions suitable for administration to humans in order to render the compositions suitable for administration to various animals is well understood, and the ordinarily skilled veterinary pharmacologist may design and perform such modification with merely ordinary, if any, experimentation. In some embodiments, subjects to which administration of the pharmaceutical compositions of the disclosure is contemplated include humans and other primates, mammals including commercially relevant mammals such as cattle, pigs, horses, sheep, cats, and dogs.

[0255] In some of any embodiments, the compositions of the disclosure are formulated using one or more pharmaceutically acceptable excipients or carriers. In some embodiments, the pharmaceutical compositions of the disclosure comprise a therapeutically effective amount of a targeted lipid particle of the disclosure and a pharmaceutically acceptable carrier. In some embodiments, pharmaceutically acceptable carriers that are useful, include, but are not limited to, glycerol, water, saline, ethanol, and other pharmaceutically acceptable salt solutions such as phosphates and salts of organic acids. Examples of these and other pharmaceutically acceptable carriers are described in Remington's Pharmaceutical Sciences (1991, Mack Publication Co., New Jersey).

[0256] In some embodiments, the carrier is a solvent or dispersion medium containing, for example, water, ethanol, polyol (for example, glycerol, propylene glycol, and liquid polyethylene glycol, and the like), suitable mixtures thereof, and vegetable oils. In some embodiments, the proper fluidity is maintained, for example, by the use of a coating such as lecithin, by the maintenance of the required particle size in the case of dispersion and by the use of surfactants. In some embodiments, prevention of the action of microorganisms is achieved by various antibacterial and antifungal agents, for example, parabens, chlorobutanol, phenol, ascorbic acid, thimerosal, and the like. In some embodiments, it is preferable to include isotonic agents, for example, sugars, sodium chloride, or polyalcohols such as mannitol and sorbitol, in the composition. In some embodiments, prolonged absorption of the injectable compositions is brought about by including in the composition an agent that delays absorption, for example, aluminum monostearate or gelatin. In some embodiments, the pharmaceutically acceptable carrier is not DMSO alone.

[0257] In some embodiments, formulations are employed in admixtures with conventional excipients, i.e., pharmaceutically acceptable organic or inorganic carrier substances suitable for oral, vaginal, parenteral, nasal, intravenous, subcutaneous, enteral, or any other suitable mode of administration, known to the art. In some embodiments, the pharmaceutical preparations are sterilized and, if desired, mixed with auxiliary agents, e.g., lubricants, preservatives, stabilizers, wetting agents, emulsifiers, salts for influencing osmotic pressure buffers, coloring, flavoring, and/or aromatic substances and the like. In some embodiments, pharmaceutical preparations are also combined with other active agents, e.g., other analgesic agents.

[0258] In some embodiments, “additional ingredients” include, but are not limited to, one or more of the following: excipients; surface active agents; dispersing agents; inert diluents; granulating and disintegrating agents; binding agents; lubricating agents; sweetening agents; flavoring agents; coloring agents; preservatives; physiologically degradable compositions such as gelatin; aqueous vehicles and solvents; oily vehicles and solvents; suspending agents; dispersing or wetting agents; emulsifying agents, demulcents; buffers; salts; thickening agents; fillers; emulsifying agents; antioxidants; antibiotics; antifungal agents; stabilizing agents; and pharmaceutically acceptable polymeric or hydrophobic materials. In some embodiments, “additional ingredients” that are included in the pharmaceutical compositions of the disclosure are known in the art and described, for example in Genaro, ed. (1985, Remington's Pharmaceutical Sciences, Mack Publishing Co., Easton, Pa.), which is incorporated herein by reference.

[0259] In some embodiments, the composition of the disclosure comprises a preservative from about 0.005% to 2.0% by total weight of the composition. In some embodiments, the preservative is used to prevent spoilage in the case of exposure to contaminants in the environment. In some embodiments, examples of preservatives useful in accordance with the disclosure included but are not limited to those selected from the group consisting of benzyl alcohol, sorbic acid, parabens, imidurea and combinations thereof. In some embodiments, a particularly preferred preservative is a combination of about 0.5% to 2.0% benzyl alcohol and 0.05% to 0.5% sorbic acid.

[0260] In some embodiments, liquid suspensions are prepared using conventional methods to achieve suspension of the targeted lipid particles of the disclosure in an aqueous or oily vehicle. In some embodiments, aqueous vehicles include, for example, water, and isotonic saline. In some embodiments, oily vehicles include, for example, almond oil, oily esters, ethyl alcohol, vegetable oils such as arachis, olive, sesame, or coconut oil, fractionated vegetable oils, and mineral oils such as liquid paraffin. In some embodiments, liquid suspensions further comprise one or more additional ingredients including, but not limited to, suspending agents, dispersing or wetting agents, emulsifying agents, demulcents, preservatives, buffers, salts, flavorings, coloring agents, and sweetening agents. In some embodiments, oily suspensions further comprise a thickening agent. In some embodiments, suspending agents include, but are not limited to, sorbitol syrup, hydrogenated edible fats, sodium alginate, polyvinylpyrrolidone, gum tragacanth, gum acacia, and cellulose derivatives such as sodium carboxymethylcellulose, methylcellulose, hydroxypropylmethylcellulose. In some embodiments, dispersing or wetting agents include, but are not limited to, naturally-occurring phosphatides such as lecithin, condensation products of an alkylene oxide with a fatty acid, with a long chain aliphatic alcohol, with a partial ester derived from a fatty acid and a hexitol, or with a partial ester derived from a fatty acid and a hexitol anhydride (e.g., polyoxyethylene stearate, heptadecaethyleneoxycetanol, polyoxyethylene sorbitol monooleate, and polyoxyethylene sorbitan monooleate, respectively). Known emulsifying agents include, but are not limited to, lecithin, and acacia. Known preservatives include, but are not limited to, methyl, ethyl, or n-propyl-para-hydroxybenzoates, ascorbic acid, and sorbic acid. Known sweetening agents include, for example, glycerol, propylene glycol, sorbitol, sucrose, and saccharin. Known thickening agents for oily suspensions include, for example, beeswax, hard paraffin, and cetyl alcohol.

[0261] In some embodiments, liquid solutions of the targeted lipid particles of the disclosure in aqueous or oily solvents are prepared in substantially the same manner as liquid suspensions, the primary difference being that the targeted lipid particles of the disclosure is dissolved, rather than suspended in the solvent. As used herein, an “oily” liquid is one which comprises a carbon-containing liquid molecule and which exhibits a less polar character than water. In some embodiments, liquid solutions of the pharmaceutical composition of the disclosure comprise each of the components described with regard to liquid suspensions, it being understood that suspending agents will not necessarily aid dissolution of the targeted lipid particles of the disclosure in the solvent. In some embodiments, aqueous solvents include, for example, water, and isotonic saline. In some embodiments, oily solvents include, for example, almond oil, oily esters, ethyl alcohol, vegetable oils such as arachis, olive, sesame, or coconut oil, fractionated vegetable oils, and mineral oils such as liquid paraffin.

[0262] In some embodiments, powdered and granular formulations of a pharmaceutical preparation of the disclosure are prepared using known methods. In some embodiments, formulations are administered directly to a subject, used, for example, to form tablets, to fill capsules, or to prepare an aqueous or oily suspension or solution by addition of an aqueous or oily vehicle thereto. In some of any embodiments, formulations further comprise one or more of dispersing or wetting agent, a suspending agent, and a preservative. Additional excipients, such as fillers and sweetening, flavoring, or coloring agents, are also included in these formulations.

[0263] In some embodiments, a pharmaceutical composition of the disclosure is also prepared, packaged, or sold in the form of oil-in-water emulsion or a water-in-oil emulsion. In some embodiments, the oily phase is a vegetable oil such as olive or arachis oil, a mineral oil such as liquid paraffin, or a combination of these. In some embodiments, compositions further comprise one or more emulsifying agents such as naturally occurring gums such as gum acacia or gum tragacanth, naturally-occurring phosphatides such as soybean or lecithin phosphatide, esters or partial esters derived from combinations of fatty acids and hexitol anhydrides such as sorbitan monooleate, and condensation products of such partial esters with ethylene oxide such as polyoxyethylene sorbitan monooleate. In some embodiments, emulsions also contain additional ingredients including, for example, sweetening or flavoring agents.

### Methods of Treatment

[0264] In some embodiments, the targeted lipid particles (e.g. targeted viral vectors) provided herein, or pharmaceutical compositions thereof as described herein are administered to a subject, e.g. a mammal, e.g. a human. In such embodiments, the subject is at risk of, has a symptom of, or is diagnosed with or identified as having, a particular disease or condition. In some embodiments, the subject has cancer. In some embodiments, the subject has an infectious disease. In some embodiments, the targeted lipid particle contains nucleic acid sequences encoding an exogenous agent for treating the disease or condition in the subject. For example, the exogenous agent is one that targets or is specific for a protein of a neoplastic cells and the targeted lipid particle is administered to a subject for treating a tumor or cancer in the subject. In another example, the exogenous agent is an inflammatory mediator or immune molecule, such as a cytokine, and targeted lipid particle is administered to a subject for treating any condition in which it is desired to modulate (e.g., increase) the immune response, such as a cancer or infectious disease. In some embodiments, the targeted lipid particle is administered in an effective amount or dose to effect treatment of the disease, condition, or disorder. Provided herein are uses of any of the provided targeted lipid particles in such methods and treatments, and in the preparation of a medicament in order to carry out such therapeutic methods. In some embodiments, the methods are carried out by administering the targeted lipid particle or compositions comprising the same, to the subject having, having had, or suspected of having the disease or condition or disorder. In some embodiments, the methods thereby treat the disease or condition or disorder in the subject. Also provided herein are uses of any of the compositions, such as pharmaceutical compositions provided herein, for the treatment of a disease, condition or disorder associated with a particular gene or protein targeted by or provided by the exogenous agent.

[0265] In some embodiments, the provided methods or uses involve administration of a pharmaceutical composition comprising oral, inhaled, transdermal or parenteral (including intravenous, intratumoral, intraperitoneal, intramuscular, intracavity, and subcutaneous) administration. In some embodiments, the targeted lipid particle is administered alone or formulated as a pharmaceutical composition. In some embodiments, the targeted lipid particle or compositions described herein are administered to a subject, e.g., a mammal, e.g., a human. In some of any embodiments, the subject is at risk of, has a symptom of, or is diagnosed with or identified as having, a particular disease or condition (e.g., a disease or condition described herein). In some embodiments, the disease is a disease or disorder. In some embodiments, the disease is a B cell malignancy.

[0266] In some embodiments, the targeted lipid particles are administered in the form of a unit-dose composition, such as a unit dose oral, parenteral, transdermal, or inhaled composition. In some embodiments, the compositions are prepared by admixture and are adapted for oral, inhaled, transdermal, or parenteral administration, and as such may be in the form of tablets, capsules, oral liquid preparations, powders, granules, lozenges, reconstitutable powders, injectable, and infusible solutions or suspensions, or suppositories or aerosols.

[0267] In some embodiments, the regimen of administration affects what constitutes an effective amount. In some embodiments, the therapeutic formulations are administered to the subject either prior to or after a diagnosis of disease. In some embodiments, several divided dosages, as well as staggered dosages are administered daily or sequentially, or the dose is continuously infused, or is a bolus injection. In some embodiments, the dosages of the therapeutic formulations are proportionally increased or decreased as indicated by the exigencies of the therapeutic or prophylactic situation.

[0268] In some embodiments, the administration of the compositions of the present disclosure to a subject, preferably a mammal, more preferably a human, are carried out using known procedures, at dosages and for periods of time effective to prevent or treat disease. In some embodiments, an effective amount of the targeted lipid particle of the disclosure necessary to achieve a therapeutic effect varies according to factors such as the activity of the particular lipid particle employed; the time of administration; the rate of excretion; the duration of the treatment; other drugs, compounds or materials used in combination with the targeted lipid particle of the disclosure; the state of the disease or disorder, age, sex, weight, condition, general health and prior medical history of the subject being treated, and like factors well-known in the medical arts. In some embodiments, the dosage regimens are adjusted to provide the optimum therapeutic response. In some embodiments, several divided doses are administered daily or the dose is proportionally reduced as indicated by the exigencies of the therapeutic situation. One of ordinary skill in the art would be able to study the relevant factors and make the determination regarding the effective amount of the therapeutic targeted lipid particle of the disclosure without undue experimentation.

[0269] In some embodiments, dosage levels of the targeted lipid particles in the pharmaceutical compositions of this disclosure are varied so as to obtain an amount that is effective to achieve the desired therapeutic response for a particular subject, composition, and mode of administration, without being toxic to the subject.

[0270] A medical doctor, e.g., physician or veterinarian, having ordinary skill in the art may readily determine and prescribe the effective amount of the pharmaceutical composition required. In some embodiments, the physician or veterinarian could start doses of the targeted lipid particles of the disclosure employed in the pharmaceutical composition at levels lower than that required in order to achieve the desired therapeutic effect and gradually increase the dosage until the desired effect is achieved.

[0271] In some embodiments, the term “container” includes any receptacle for holding the pharmaceutical composition. In some embodiments, the container is the packaging that contains the pharmaceutical composition. In other embodiments, the container is not the packaging that contains the pharmaceutical composition, i.e., the container is a receptacle, such as a box or vial that contains the packaged pharmaceutical composition or unpackaged pharmaceutical composition and the instructions for use of the pharmaceutical composition. It should be understood that the instructions for use of the pharmaceutical composition may be contained on the packaging containing the pharmaceutical composition, and as such the instructions form an increased functional relationship to the packaged product. In some embodiments, instructions contain information pertaining to the pharmaceutical composition's ability to perform its intended function, e.g., treating or preventing a disease in a subject, or delivering an imaging or diagnostic agent to a subject.

[0272] In some embodiments, routes of administration of any of the compositions disclosed herein include oral, nasal, rectal, parenteral, sublingual, transdermal, transmucosal (e.g., sublingual, lingual, (trans) buccal, (trans) urethral, vaginal (e.g., trans- and perivaginally), (intra) nasal, and (trans) rectal), intravesical, intrapulmonary, intraduodenal, intragastrical, intrathecal, subcutaneous, intramuscular, intradermal, intra-arterial, intravenous, intrabronchial, inhalation, and topical administration.

[0273] In some of any embodiments, suitable compositions and dosage forms include, for example, tablets, capsules, caplets, pills, gel caps, troches, dispersions, suspensions, solutions, syrups, granules, beads, transdermal patches, gels, powders, pellets, magmas, lozenges, creams, pastes, plasters, lotions, discs, suppositories, liquid sprays for nasal or oral administration, dry powder or aerosolized formulations for inhalation, compositions and formulations for intravesical administration, and the like.

[0274] In some embodiments, the targeted lipid particle composition comprising an exogenous agent or cargo, are used to deliver such exogenous agent or cargo to a cell tissue or subject. In some embodiments, delivery of a cargo by administration of a targeted lipid particle composition described herein modify cellular protein expression levels. In certain embodiments, the administered composition directs upregulation (via expression in the cell, delivery in the cell, or induction within the cell) of one or more cargo (e.g., a polypeptide or mRNA) that provide a functional activity which is substantially absent or reduced in the cell in which the polypeptide is delivered. In some embodiments, the missing functional activity is enzymatic, structural, or regulatory in nature. In some embodiments, the administered composition directs up-regulation of one or more proteins that increases (e.g., synergistically) a functional activity which is present but substantially deficient in the cell in which the protein is upregulated. In some of any embodiments disclosed herein, the administered composition directs downregulation of (via expression in the cell, delivery in the cell, or induction within the cell) one or more cargo (e.g., a protein, siRNA, or miRNA) that repress a functional activity which is present or upregulated in the cell in which the protein, siRNA, or miRNA is delivered. In some embodiments, the upregulated functional activity is enzymatic, structural, or regulatory in nature. In some embodiments, the administered composition directs down-regulation of one or more proteins that decreases (e.g., synergistically) a functional activity which is present or upregulated in the cell in which the protein is downregulated. In some embodiments, the administered composition directs upregulation of certain functional activities and downregulation of other functional activities.

[0275] In some of any embodiments, the targeted lipid particle composition (e.g., one comprising mitochondria or DNA) mediates an effect on a target cell, and the effect lasts for at least 1, 2, 3, 4, 5, 6, or 7 days, 2, 3, or 4 weeks, or 1, 2, 3, 6, or 12 months. In some embodiments (e.g., wherein the targeted viral vector composition comprises an exogenous protein), the effect lasts for less than 1, 2, 3, 4, 5, 6, or 7 days, 2, 3, or 4 weeks, or 1, 2, 3, 6, or 12 months.

[0276] In some of any embodiments, the targeted lipid particle composition described herein is delivered ex-vivo to a cell or tissue, e.g., a human cell or tissue. In embodiments, the composition improves function of a cell or tissue ex-vivo, e.g., improves cell viability, respiration, or other function (e.g., another function described herein).

[0277] In some embodiments, the composition is delivered to an ex vivo tissue that is in an injured state (e.g., from trauma, disease, hypoxia, ischemia or other damage).

[0278] In some embodiments, the composition is delivered to an ex-vivo transplant (e.g., a tissue explant or tissue for transplantation, e.g., a human vein, a musculoskeletal graft such as bone or tendon, cornea, skin, heart valves, nerves; or an isolated or cultured organ, e.g., an organ to be transplanted into a human, e.g., a human heart, liver, lung, kidney, pancreas, intestine, thymus, eye). In some embodiments, the composition is delivered to the tissue or organ before, during and/or after transplantation.

[0279] In some embodiments, the composition is delivered, administered, or contacted with a cell, e.g., a cell preparation. In some embodiments, the cell preparation is a cell therapy preparation (a cell preparation intended for administration to a human subject). In embodiments, the cell preparation comprises cells expressing a T-cell receptor (TCR) or chimeric antigen receptor (CAR), e.g., expressing a recombinant CAR. The cells expressing the CAR may be, e.g., T cells, Natural Killer (NK) cells, cytotoxic T lymphocytes (CTL), regulatory T cells. In embodiments, the cell preparation is a neural stem cell preparation. In embodiments, the cell preparation is a mesenchymal stem cell (MSC) preparation. In embodiments, the cell preparation is a hematopoietic stem cell (HSC) preparation. In embodiments, the cell preparation is an islet cell preparation.

[0280] In some embodiments, the viral vector comprising an anti-CD4 sdAb or scFv composition described herein is used to deliver a CAR or TCR. In some embodiments, the viral vector transduces a cell expressing CD4 (e.g., a CD4+ T cell) and expresses and amplifies the CAR or TCR. The amplified CAR or TCR T cells then mediate targeted cell killing. Thus, the disclosure includes the use of viral vector comprising an anti-CD4 scFv fusogen construct to elicit an immune response specific to the antigen binding moiety of the CAR or TCR. In some embodiments, the CAR is used to target a tumor antigen selected from CD19, CD20, CD22, or BCMA. In another embodiment, the CAR is engineered to comprise an intracellular signaling domain of the T cell antigen receptor complex zeta chain (e.g., CD3 zeta). In a preferred embodiment, the intracellular domain is selected from a CD137 (4-1BB) signaling domain, a CD28 signaling domain, and a CD3zeta signaling domain.

### Engineered Receptor Payloads

[0281] In some embodiments, the targeted lipid particles (e.g. targeted viral vectors) disclosed herein encode an engineered receptor. In some embodiments, the cells for use in or administered in connection with the provided methods contain or are engineered to contain an engineered receptor, e.g., an engineered antigen receptor, such as a chimeric antigen receptor (CAR). Also provided are populations of such cells, compositions containing such cells and/or enriched for such cells, such as in which cells of a certain type such as T cells or CD4+ cells are enriched or selected. Among the compositions are pharmaceutical compositions and formulations for administration, such as for adoptive cell therapy. Also provided are therapeutic methods for administering the cells and compositions to subjects, e.g., patients, in accord with the provided methods, and/or with the provided articles of manufacture or compositions.

[0282] In some embodiments, gene transfer is accomplished without first stimulating the cells, such as by combining it with a stimulus that induces a response such as proliferation, survival, and/or activation, e.g., as measured by expression of a cytokine or activation marker, followed by introduction of the nucleic acids, e.g., by transduction, into the stimulated cells, and optionally incubation or expansion in culture to numbers sufficient for clinical applications.

[0283] The viral vectors may express recombinant receptors, such as antigen receptors including chimeric antigen receptors (CARs), and other antigen-binding receptors such as transgenic T cell receptors (TCRs). Also among the receptors are other chimeric receptors.

a. Chimeric Antigen Receptors (CARs)

[0284] In some embodiments of the provided methods and uses, chimeric receptors, such as a CARs, contain one or more domains that combine an antigen- or ligand-binding domain (e.g. antibody or antibody fragment) that provides specificity for a desired antigen (e.g., tumor antigen) with intracellular signaling domains. In some embodiments, the intracellular signaling domain is a stimulating or an activating intracellular domain portion, such as a T cell stimulating or activating domain, providing a primary activation signal or a primary signal. In some embodiments, the intracellular signaling domain contains or additionally contains a costimulatory signaling domain to facilitate effector functions. In some embodiments, chimeric receptors when genetically engineered into immune cells modulate T cell activity, and, in some cases, modulate T cell differentiation or homeostasis, thereby resulting in genetically engineered cells with improved longevity, survival and/or persistence in vivo, such as for use in adoptive cell therapy methods.

[0285] Exemplary antigen receptors, including CARs, and methods for engineering and introducing such receptors into cells, include those described, for example, in W0200014257, WO2013126726, WO2012/129514, WO2014031687, WO2013/166321, WO2013/071154, WO2013/123061, U.S. patent app. Pub. Nos. US2002131960, US2013287748, US20130149337, U.S. Pat. Nos. 6,451,995, 7,446,190, 8,252,592, 8,339,645, 8,398,282, 7,446,179, 6,410,319, 7,070,995, 7,265,209, 7,354,762, 7,446,191, 8,324,353, and 8,479,118, and European patent app. No. EP2537416, and/or those described by Sadelain et al., Cancer Discov. 2013 April; 3(4): 388-398; Davila et al. (2013) PLOS ONE 8(4):e61338; Turtle et al., Curr. Opin. Immunol., 2012 October; 24(5): 633-39; Wu et al., Cancer, 2012 Mar. 18(2): 160-75. In some aspects, the antigen receptors include a CAR as described in U.S. Pat. No. 7,446,190, and those described in WO/2014055668. Examples of the CARs include CARs as disclosed in any of the aforementioned publications, such as WO2014031687, U.S. Pat. Nos. 8,339,645, 7,446,179, US 2013/0149337, U.S. Pat. Nos. 7,446,190, 8,389,282, Kochenderfer et al., (2013) Nature Reviews Clinical Oncology, 10, 267-276; Wang et al. (2012) J. Immunother. 35(9): 689-701; and Brentjens et al., Sci Transl Med. 2013 5(177). See also WO2014031687, U.S. Pat. Nos. 8,339,645, 7,446,179, US 2013/0149337, U.S. Pat. Nos. 7,446,190, and 8,389,282. The recombinant receptors, such as CARs, generally include an extracellular antigen binding domain, such as a portion of an antibody molecule, generally a variable heavy (VH) chain region and/or variable light (VL) chain region of the antibody, e.g., an scFv antibody fragment. In some embodiments, the antigen binding domain of the CAR molecule comprises an antibody, an antibody fragment, an scFv, a Fv, a Fab, a (Fab′)2, a single domain antibody (SdAb), a VH or VL domain, or a camelid VHH domain.

[0286] In some embodiments, the antigen targeted by the receptor is a polypeptide. In some embodiments, it is a carbohydrate or other molecule. In some embodiments, the antigen is selectively expressed or overexpressed on cells of the disease or condition, e.g., the tumor or pathogenic cells, as compared to normal or non-targeted cells or tissues. In other embodiments, the antigen is expressed on normal cells and/or is expressed on the engineered cells.

[0287] In some embodiments, the antigen targeted by the receptor includes antigens associated with a B cell malignancy, such as any of a number of known B cell marker. In some embodiments, the antigen targeted by the receptor is CD20, CD19, CD22, ROR1, CD45, CD47, CD21, CD5, CD33, Igkappa, Iglambda, CD79a, CD79b or CD30.

[0288] In some embodiments, the chimeric antigen receptor includes an extracellular portion containing an antibody or antibody fragment. In some aspects, the chimeric antigen receptor includes an extracellular portion containing the antibody or fragment and an intracellular signaling domain. In some embodiments, the antibody or fragment includes an scFv.

[0289] In some embodiments, the antigen targeted by the antigen-binding domain is CD19. In some aspects, the antigen-binding domain of the recombinant receptor, e.g., CAR, and the antigen-binding domain binds, such as specifically binds or specifically recognizes, a CD19, such as a human CD19. In some embodiments, the scFv contains a VH and a VL derived from an antibody or an antibody fragment specific to CD19. In some embodiments, the antibody or antibody fragment that binds CD19 is a mouse derived antibody such as FMC63 and SJ25C1. In some embodiments, the antibody or antibody fragment is a human antibody, e.g., as described in U.S. Patent Publication No. US 2016/0152723.

[0290] In some embodiments, the antigen is CD19. In some embodiments, the scFv contains a VH and a VL derived from an antibody or an antibody fragment specific to CD19. In some embodiments, the antibody or antibody fragment that binds CD19 is a mouse derived antibody such as FMC63 and SJ25C1. In some embodiments, the antibody or antibody fragment is a human antibody, e.g., as described in U.S. Patent Publication No. US 2016/0152723.

[0291] In some embodiments, the scFv is derived from FMC63. FMC63 generally refers to a mouse monoclonal IgGI antibody raised against Nalm-1 and -16 cells expressing CD19 of human origin (Fing, N. R., et al. (1987). Leucocyte typing III. 302).

[0292] In some embodiments, the antigen targeted by the antigen-binding domain is BCMA. In some aspects, the antigen-binding domain of the recombinant receptor, e.g., CAR, and the antigen-binding domain binds, such as specifically binds or specifically recognizes, a BCMA, such as a human BCMA. In some embodiments, the antigen-binding domain is a fully human VH sdAb disclosed in US2020/0138865 (disclosed herein by reference in its entirety), e.g., FHVH74, FHVH32, FHVH33, or FHVH93.

### Antigen Binding Domain (ABD) Targets an Antigen Characteristic of a Neoplastic or Cancer Cell

[0293] In some embodiments, the antigen binding domain (ABD) targets an antigen characteristic of a neoplastic cell. In other words, the antigen binding domain targets an antigen expressed by a neoplastic or cancer cell. In some embodiments, the ABD binds a tumor associated antigen. In some embodiments, the antigen characteristic of a neoplastic cell (e.g., antigen associated with a neoplastic or cancer cell) or a tumor associated antigen is selected from a cell surface receptor, an ion channel-linked receptor, an enzyme-linked receptor, a G protein-coupled receptor, receptor tyrosine kinase, tyrosine kinase associated receptor, receptor-like tyrosine phosphatase, receptor serine/threonine kinase, receptor guanylyl cyclase, histidine kinase associated receptor, epidermal growth factor receptors (EGFR) (including ErbB1/EGFR, ErbB2/HER2, ErbB3/HER3, and ErbB4/HER4), fibroblast growth factor receptors (FGFR) (including FGF1, FGF2, FGF3, FGF4, FGF5, FGF6, FGF7, FGF18, and FGF21), vascular endothelial growth factor receptors (VEGFR) (including VEGF-A, VEGF-B, VEGF-C, VEGF-D, and PIGF), RET Receptor and the Eph Receptor Family (including EphA1, EphA2, EphA3, EphA4, EphA5, EphA6, EphA7, EphA8, EphA9, EphA10, EphB1, EphB2. EphB3, EphB4, and EphB6), CXCR1, CXCR2, CXCR3, CXCR4, CXCR6, CCR1, CCR2, CCR3, CCR4, CCR5, CCR6, CCR8, CFTR, CIC-1, CIC-2, CIC-4, CIC-5, CIC-7, CIC-Ka, CIC-Kb, Bestrophins, TMEM16A, GABA receptor, glycin receptor, ABC transporters, NAV1.1, NAV1.2, NAV1.3, NAV1.4, NAV1.5, NAV1.6, NAV1.7, NAV1.8, NAV1.9, sphingosin-1-phosphate receptor (S1P1R), NMDA channel, transmembrane protein, multispan transmembrane protein, T-cell receptor motifs, T-cell alpha chains, T-cell β chains, T-cell γ chains, T-cell δ chains, CCR7, CD3, CD4, CD5, CD7, CD8, CD11b, CD11c, CD16, CD19, CD20, CD21, CD22, CD25, CD28, CD34, CD35, CD40, CD45RA, CD45RO, CD52, CD56, CD62L, CD68, CD80, CD95, CD117, CD127, CD133, CD137 (4-1BB), CD163, F4/80, IL-4Ra, Sca-1, CTLA-4, GITR, GARP, LAP, granzyme B, LFA-1, transferrin receptor, NKp46, perforin, CD4+, Th1, Th2, Th17, Th40, Th22, Th9, Tfh, canonical Treg. FoxP3+, Tr1, Th3, Treg17, TREG; CDCP, NT5E, EpCAM, CEA, gpA33, mucins, TAG-72, carbonic anhydrase IX, PSMA, folate binding protein, gangliosides (e.g., CD2, CD3, GM2), Lewis-γ², VEGF, VEGFR 1/2/3, αVβ3, α5β1, ErbB1/EGFR, ErbB1/HER2, ErB3, c-MET, IGF1R, EphA3, TRAIL-R1, TRAIL-R2, RANKL, FAP, Tenascin, PDL-1, BAFF, HDAC, ABL, FLT3, KIT, MET, RET, IL-1β, ALK, RANKL, mTOR, CTLA-4, IL-6, IL-6R, JAK3, BRAF, PTCH, Smoothened, PIGF, ANPEP, TIMP1, PLAUR, PTPRJ, LTBR, ANTXR1, folate receptor alpha (FRa), ERBB2 (Her2/neu), EphA2, IL-13Ra2, epidermal growth factor receptor (EGFR), mesothelin, TSHR, CD19, CD123, CD22, CD30, CD171, CS-1, CLL-1, CD33, EGFRvIII, GD2, GD3, BCMA, MUC16 (CA125), L1CAM, LeY, MSLN, IL13Rα1, L1-CAM, Tn Ag, prostate specific membrane antigen (PSMA), ROR1, FLT3, FAP, TAG72, CD38, CD44v6, CEA, EPCAM, B7H3, KIT, interleukin-11 receptor a (IL-11Ra), PSCA, PRSS21, VEGFR2, LewisY, CD24, platelet-derived growth factor receptor-beta (PDGFR-beta), SSEA-4, CD20, MUC1, NCAM, Prostase, PAP, ELF2M, Ephrin B2, IGF-1 receptor, CAIX, LMP2, gpl00, bcr-abl, tyrosinase, Fucosyl GM1, sLe, GM3, TGS5, HMWMAA, o-acetyl-GD2, folate receptor beta, TEM1/CD248, TEM7R, CLDN6, GPRC5D, CXORF61, CD97, CD179a, ALK, Polysialic acid, PLACI, GloboH, NY-BR-1, UPK2, HAVCR1, ADRB3, PANX3, GPR20, LY6K, OR51E2, TARP, WT1, NY-ESO-1, LAGE-la, MAGE-A1, legumain, HPV E6, E7, ETV6-AML, sperm protein 17, XAGE1, Tie 2, MAD-CT-1, MAD-CT-2, major histocompatibility complex class I-related gene protein (MR1), urokinase-type plasminogen activator receptor (uPAR), Fos-related antigen 1, p53, p53 mutant, prostein, survivin, telomerase, PCTA-1/Galectin 8, MelanA/MART1, Ras mutant, hTERT, sarcoma translocation breakpoints, ML-IAP, ERG (TMPRSS2 ETS fusion gene), NA17, PAX3, androgen receptor, cyclin B1, MYCN, RhoC, TRP-2, CYPIB I, BORIS, SART3, PAX5, OY-TES1, LCK, AKAP-4, SSX2, RAGE-1, human telomerase reverse transcriptase, RU1, RU2, intestinal carboxyl esterase, mut hsp70-2, CD79a, CD79b, CD72, LAIR1, FCAR, LILRA2, CD300LF, CLEC12A, BST2, EMR2, LY75, GPC3, FCRL5, IGLL1, a neoantigen, CD133, CD15, CD184, CD24, CD56, CD26, CD29, CD44, HLA-A, HLA-B, HLA-C, (HLA-A,B,C) CD49f, CD151 CD340, CD200, tkrA, trkB, or trkC, or an antigenic fragment or antigenic portion thereof.

### ABD Targets an Antigen Characteristic of a T Cell

[0294] In some embodiments, the antigen binding domain targets an antigen characteristic of a T cell. In some embodiments, the ABD binds an antigen associated with a T cell. In some instances, such an antigen is expressed by a T cell or is located on the surface of a T cell. In some embodiments, the antigen characteristic of a T cell or the T cell associated antigen is selected from a cell surface receptor, a membrane transport protein (e.g., an active or passive transport protein such as, for example, an ion channel protein, a pore-forming protein, etc.), a transmembrane receptor, a membrane enzyme, and/or a cell adhesion protein characteristic of a T cell. In some embodiments, an antigen characteristic of a T cell is a G protein-coupled receptor, receptor tyrosine kinase, tyrosine kinase associated receptor, receptor-like tyrosine phosphatase, receptor serine/threonine kinase, receptor guanylyl cyclase, histidine kinase associated receptor, AKT1; AKT2; AKT3; ATF2; BCL10; CALM1; CD3D (CD30); CD3E (CD38); CD3G (CD3γ); CD4; CD8; CD28; CD45; CD80 (B7-1); CD86 (B7-2); CD247 (CD32); CTLA-4 (CD152); ELK1; ERK1 (MAPK3); ERK2; FOS; FYN; GRAP2 (GADS); GRB2; HLA-DRA; HLA-DRB1; HLA-DRB3; HLA-DRB4; HLA-DRB5; HRAS; IKBKA (CHUK); IKBKB; IKBKE; IKBKG (NEMO); IL2; ITPR1; ITK; JUN; KRAS2; LAT; LCK; MAP2K1 (MEK1); MAP2K2 (MEK2); MAP2K3 (MKK3); MAP2K4 (MKK4); MAP2K6 (MKK6); MAP2K7 (MKK7); MAP3K1 (MEKK1); MAP3K3; MAP3K4; MAP3K5; MAP3K8; MAP3K14 (NIK); MAPK8 (JNK1); MAPK9 (JNK2); MAPK10 (JNK3); MAPK11 (p383); MAPK12 (p38γ); MAPK13 (p380); MAPK14 (p38a); NCK; NFAT1; NFAT2; NFKB1; NFKB2; NFKBIA; NRAS; PAK1; PAK2; PAK3; PAK4; PIK3C2B; PIK3C3 (VPS34); PIK3CA; PIK3CB; PIK3CD; PIK3R1; PKCA; PKCB; PKCM; PKCQ; PLCY1; PRF1 (Perforin); PTEN; RAC1; RAF1; RELA; SDF1; SHP2; SLP76; SOS; SRC; TBK1; TCRA; TEC; TRAF6; VAV1; VAV2; or ZAP70.

### ABD Targets an Antigen Characteristic of an Autoimmune or Inflammatory Disorder

[0295] In some embodiments, the antigen binding domain targets an antigen characteristic of an autoimmune or inflammatory disorder. In some embodiments, the ABD binds an antigen associated with an autoimmune or inflammatory disorder. In some instances, the antigen is expressed by a cell associated with an autoimmune or inflammatory disorder. In some embodiments, the autoimmune or inflammatory disorder is selected from chronic graft-vs-host disease (GVHD), lupus, arthritis, immune complex glomerulonephritis, goodpasture syndrome, uveitis, hepatitis, systemic sclerosis or scleroderma, type I diabetes, multiple sclerosis, cold agglutinin disease, Pemphigus vulgaris, Grave's disease, autoimmune hemolytic anemia, Hemophilia A, Primary Sjogren's Syndrome, thrombotic thrombocytopenia purrpura, neuromyelits optica, Evan's syndrome, IgM mediated neuropathy, cryoglobulinemia, dermatomyositis, idiopathic thrombocytopenia, ankylosing spondylitis, bullous pemphigoid, acquired angioedema, chronic urticarial, antiphospholipid demyelinating polyneuropathy, and autoimmune thrombocytopenia or neutropenia or pure red cell aplasias, while exemplary non-limiting examples of alloimmune diseases include allosensitization (see, for example, Blazar et al., 2015, Am. J. Transplant, 15(4):931-41) or xenosensitization from hematopoietic or solid organ transplantation, blood transfusions, pregnancy with fetal allosensitization, neonatal alloimmune thrombocytopenia, hemolytic disease of the newborn, sensitization to foreign antigens such as can occur with replacement of inherited or acquired deficiency disorders treated with enzyme or protein replacement therapy, blood products, and gene therapy. In some embodiments, the antigen characteristic of an autoimmune or inflammatory disorder is selected from a cell surface receptor, an ion channel-linked receptor, an enzyme-linked receptor, a G protein-coupled receptor, receptor tyrosine kinase, tyrosine kinase associated receptor, receptor-like tyrosine phosphatase, receptor serine/threonine kinase, receptor guanylyl cyclase, or histidine kinase associated receptor.

[0296] In some embodiments, an antigen binding domain of a CAR binds to a ligand expressed on B cells, plasma cells, or plasmablasts. In some embodiments, an antigen binding domain of a CAR binds to CD10, CD19, CD20, CD22, CD24, CD27, CD38, CD45R, CD138, CD319, BCMA, CD28, TNF, interferon receptors, GM-CSF, ZAP-70, LFA-1, CD3 gamma, CD5 or CD2. See, e.g., US 2003/0077249; WO 2017/058753; WO 2017/058850, the contents of which are herein incorporated by reference.

### ABD Targets an Antigen Characteristic of Senescent Cells

[0297] In some embodiments, the antigen binding domain targets an antigen characteristic of senescent cells, e.g., urokinase-type plasminogen activator receptor (uPAR). In some embodiments, the ABD binds an antigen associated with a senescent cell. In some instances, the antigen is expressed by a senescent cell. In some embodiments, the CAR is used for treatment or prophylaxis of disorders characterized by the aberrant accumulation of senescent cells, e.g., liver and lung fibrosis, atherosclerosis, diabetes and osteoarthritis.

### ABD Targets an Antigen Characteristic of an Infectious Disease

[0298] In some embodiments, the antigen binding domain targets an antigen characteristic of an infectious disease. In some embodiments, the ABD binds an antigen associated with an infectious disease. In some instances, the antigen is expressed by a cell affected by an infectious disease. In some embodiments, wherein the infectious disease is selected from HIV, hepatitis B virus, hepatitis C virus, Human herpes virus, Human herpes virus 8 (HHV-8, Kaposi sarcoma-associated herpes virus (KSHV)), Human T-lymphotrophic virus-1 (HTLV-1), Merkel cell polyomavirus (MCV), Simian virus 40 (SV40), Epstein-Barr virus, CMV, human papillomavirus. In some embodiments, the antigen characteristic of an infectious disease is selected from a cell surface receptor, an ion channel-linked receptor, an enzyme-linked receptor, a G protein-coupled receptor, receptor tyrosine kinase, tyrosine kinase associated receptor, receptor-like tyrosine phosphatase, receptor serine/threonine kinase, receptor guanylyl cyclase, histidine kinase associated receptor, HIV Env, gpl20, or CD4-induced epitope on HIV-1 Env.

### ABD Binds to a Cell Surface Antigen of a Cell

[0299] In some embodiments, an antigen binding domain binds to a cell surface antigen of a cell. In some embodiments, a cell surface antigen is characteristic of (e.g., expressed by) a particular or specific cell type. In some embodiments, a cell surface antigen is characteristic of more than one type of cell.

[0300] In some embodiments, a CAR antigen binding domain binds a cell surface antigen characteristic of a T cell, such as a cell surface antigen on a T cell. In some embodiments, an antigen characteristic of a T cell is a cell surface receptor, a membrane transport protein (e.g., an active or passive transport protein such as, for example, an ion channel protein, a pore-forming protein, etc.), a transmembrane receptor, a membrane enzyme, and/or a cell adhesion protein characteristic of a T cell. In some embodiments, an antigen characteristic of a T cell is a G protein-coupled receptor, receptor tyrosine kinase, tyrosine kinase associated receptor, receptor-like tyrosine phosphatase, receptor serine/threonine kinase, receptor guanylyl cyclase, or histidine kinase associated receptor.

[0301] In some embodiments, an antigen binding domain of a CAR binds a T cell receptor. In some embodiments, a T cell receptor is AKT1; AKT2; AKT3; ATF2; BCL10; CALM1; CD3D (CD30); CD3E (CD38); CD3G (CD3γ); CD4; CD8; CD28; CD45; CD80 (B7-1); CD86 (B7-2); CD247 (CD3ζ); CTLA-4 (CD152); ELK1; ERK1 (MAPK3); ERK2; FOS; FYN; GRAP2 (GADS); GRB2; HLA-DRA; HLA-DRB1; HLA-DRB3; HLA-DRB4; HLA-DRB5; HRAS; IKBKA (CHUK); IKBKB; IKBKE; IKBKG (NEMO); IL2; ITPR1; ITK; JUN; KRAS2; LAT; LCK; MAP2K1 (MEK1); MAP2K2 (MEK2); MAP2K3 (MKK3); MAP2K4 (MKK4); MAP2K6 (MKK6); MAP2K7 (MKK7); MAP3K1 (MEKK1); MAP3K3; MAP3K4; MAP3K5; MAP3K8; MAP3K14 (NIK); MAPK8 (JNK1); MAPK9 (JNK2); MAPK10 (JNK3); MAPK11 (p38B); MAPK12 (p38γ); MAPK13 (p380); MAPK14 (p38a); NCK; NFAT1; NFAT2; NFKB1; NFKB2; NFKBIA; NRAS; PAK1; PAK2; PAK3; PAK4; PIK3C2B; PIK3C3 (VPS34); PIK3CA; PIK3CB; PIK3CD; PIK3R1; PKCA; PKCB; PKCM; PKCQ; PLCY1; PRF1 (Perforin); PTEN; RAC1; RAF1; RELA; SDF1; SHP2; SLP76; SOS; SRC; TBK1; TCRA; TEC; TRAF6; VAV1; VAV2; or ZAP70.

### Transmembrane Domain

[0302] In some embodiments, the CAR transmembrane domain comprises at least a transmembrane region of the alpha, beta or zeta chain of a T cell receptor, CD28, CD3 epsilon, CD45, CD4, CD5, CD8, CD9, CD16, CD22, CD33, CD37, CD64, CD80, CD86, CD134, CD137, CD154, or functional variant thereof. In some embodiments, the transmembrane domain comprises at least a transmembrane region(s) of CD4, 4-1BB/CD137, CD28, CD34, CD4, FcεRIγ, CD16, OX40/CD134, CD3ζ, CD3ε, CD3γ, CD3δ, TCRα, TCRβ, TCRζ, CD32, CD64, CD64, CD45, CD5, CD9, CD22, CD37, CD80, CD86, CD40, CD40L/CD154, VEGFR2, FAS, and FGFR2B, or functional variant thereof. antigen binding domain binds

### Signaling Domain or Plurality of Signaling Domains

[0303] In some embodiments, a CAR described herein comprises one or at least one signaling domain selected from one or more of B7-1/CD80; B7-2/CD86; B7-H1/PD-L1; B7-H2; B7-H3; B7-H4; B7-H6; B7-H7; BTLA/CD272; CD28; CTLA-4; Gi24/VISTA/B7-H5; ICOS/CD278; PD-1; PD-L2/B7-DC; PDCD6); 4-1BB/TNFSF9/CD137; 4-1BB Ligand/TNFSF9; BAFF/BLyS/TNFSF13B; BAFF R/TNFRSF13C; CD27/TNFRSF7; CD27 Ligand/TNFSF7; CD30/TNFRSF8; CD30 Ligand/TNFSF8; CD40/TNFRSF5; CD40/TNFSF5; CD40 Ligand/TNFSF5; DR3/TNFRSF25; GITR/TNFRSF18; GITR Ligand/TNFSF18; HVEM/TNFRSF14; LIGHT/TNFSF14; Lymphotoxin-alpha/TNF-beta; OX40/TNFRSF4; OX40 Ligand/TNFSF4; RELT/TNFRSF19L; TACI/TNFRSF13B; TL1A/TNFSF15; TNF-alpha; TNF RII/TNFRSF1B); 2B4/CD244/SLAMF4; BLAME/SLAMF8; CD2; CD2F-10/SLAMF9; CD48/SLAMF2; CD58/LFA-3; CD84/SLAMF5; CD229/SLAMF3; CRACC/SLAMF7; NTB-A/SLAMF6; SLAM/CD150); CD2; CD7; CD53; CD82/Kai-1; CD90/Thyl; CD96; CD160; CD200; CD300a/LMIR1; HLA Class I; HLA-DR; Ikaros; Integrin alpha 4/CD49d; Integrin alpha 4 beta 1; Integrin alpha 4 beta 7/LPAM-1; LAG-3; TCL1A; TCL1B; CRTAM; DAP12; Dectin-1/CLEC7A; DPPIV/CD26; EphB6; TIM-1/KIM-1/HAVCR; TIM-4; TSLP; TSLP R; lymphocyte function associated antigen-1 (LFA-1); NKG2C, a CD3 zeta domain, an immunoreceptor tyrosine-based activation motif (ITAM), CD27, CD28, 4-1BB, CD134/OX40, CD30, CD40, PD-1, ICOS, lymphocyte function-associated antigen-1 (LFA-1), CD2, CD7, LIGHT, NKG2C, B7-H3, a ligand that specifically binds with CD83, or functional fragment thereof.

[0304] In some embodiments, the at least one signaling domain comprises a CD3 zeta domain or an immunoreceptor tyrosine-based activation motif (ITAM), or functional variant thereof. In other embodiments, the at least one signaling domain comprises (i) a CD3 zeta domain, or an immunoreceptor tyrosine-based activation motif (ITAM), or functional variant thereof; and (ii) a CD28 domain, or a 4-1BB domain, or functional variant thereof. In yet other embodiments, the at least one signaling domain comprises a (i) a CD3 zeta domain, or an immunoreceptor tyrosine-based activation motif (ITAM), or functional variant thereof; (ii) a CD28 domain or functional variant thereof; and (iii) a 4-1BB domain, or a CD134 domain, or functional variant thereof. In some embodiments, the at least one signaling domain comprises a (i) a CD3 zeta domain, or an immunoreceptor tyrosine-based activation motif (ITAM), or functional variant thereof; (ii) a CD28 domain or functional variant thereof; (iii) a 4-1BB domain, or a CD134 domain, or functional variant thereof; and (iv) a cytokine or costimulatory ligand transgene.

[0305] In some embodiments, the at least two signaling domains comprise a CD3 zeta domain or an immunoreceptor tyrosine-based activation motif (ITAM), or functional variant thereof. In other embodiments, the at least two signaling domains comprise (i) a CD3 zeta domain, or an immunoreceptor tyrosine-based activation motif (ITAM), or functional variant thereof; and (ii) a CD28 domain, or a 4-1BB domain, or functional variant thereof. In yet other embodiments, the at least one signaling domain comprises a (i) a CD3 zeta domain, or an immunoreceptor tyrosine-based activation motif (ITAM), or functional variant thereof; (ii) a CD28 domain or functional variant thereof; and (iii) a 4-1BB domain, or a CD134 domain, or functional variant thereof. In some embodiments, the at least two signaling domains comprise a (i) a CD3 zeta domain, or an immunoreceptor tyrosine-based activation motif (ITAM), or functional variant thereof; (ii) a CD28 domain or functional variant thereof; (iii) a 4-1BB domain, or a CD134 domain, or functional variant thereof; and (iv) a cytokine or costimulatory ligand transgene.

[0306] In some embodiments, the at least three signaling domains comprise a CD3 zeta domain or an immunoreceptor tyrosine-based activation motif (ITAM), or functional variant thereof. In other embodiments, the at least three signaling domains comprise (i) a CD3 zeta domain, or an immunoreceptor tyrosine-based activation motif (ITAM), or functional variant thereof; and (ii) a CD28 domain, or a 4-1BB domain, or functional variant thereof. In yet other embodiments, the least three signaling domains comprises a (i) a CD3 zeta domain, or an immunoreceptor tyrosine-based activation motif (ITAM), or functional variant thereof; (ii) a CD28 domain or functional variant thereof; and (iii) a 4-1BB domain, or a CD134 domain, or functional variant thereof. In some embodiments, the at least three signaling domains comprise a (i) a CD3 zeta domain, or an immunoreceptor tyrosine-based activation motif (ITAM), or functional variant thereof; (ii) a CD28 domain or functional variant thereof; (iii) a 4-1BB domain, or a CD134 domain, or functional variant thereof; and (iv) a cytokine or costimulatory ligand transgene.

[0307] In some embodiments, the CAR comprises a CD3 zeta domain or an immunoreceptor tyrosine-based activation motif (ITAM), or functional variant thereof. In some embodiments, the CAR comprises (i) a CD3 zeta domain, or an immunoreceptor tyrosine-based activation motif (ITAM), or functional variant thereof; and (ii) a CD28 domain, or a 4-1BB domain, or functional variant thereof.

[0308] In some embodiments, the CAR comprises a (i) a CD3 zeta domain, or an immunoreceptor tyrosine-based activation motif (ITAM), or functional variant thereof; (ii) a CD28 domain or functional variant thereof; and (iii) a 4-1BB domain, or a CD134 domain, or functional variant thereof.

[0309] In some embodiments, the CAR comprises (i) a CD3 zeta domain, or an immunoreceptor tyrosine-based activation motif (ITAM), or functional variant thereof; (ii) a CD28 domain, or a 4-1BB domain, or functional variant thereof, and/or (iii) a 4-1BB domain, or a CD134 domain, or functional variant thereof.

[0310] In some embodiments, the CAR comprises a (i) a CD3 zeta domain, or an immunoreceptor tyrosine-based activation motif (ITAM), or functional variant thereof; (ii) a CD28 domain or functional variant thereof; (iii) a 4-1BB domain, or a CD134 domain, or functional variant thereof; and (iv) a cytokine or costimulatory ligand transgene.

Domain which Upon Successful Signaling of the CAR Induces Expression of a Cytokine Gene

[0311] In some embodiments, a first, second, third, or fourth generation CAR further comprises a domain which upon successful signaling of the CAR induces expression of a cytokine gene. In some embodiments, a cytokine gene is endogenous or exogenous to a target cell comprising a CAR which comprises a domain which upon successful signaling of the CAR induces expression of a cytokine gene. In some embodiments, a cytokine gene encodes a pro-inflammatory cytokine. In some embodiments, a cytokine gene encodes IL-1, IL-2, IL-9, IL-12, IL-18, TNF, or IFN-gamma, or functional fragment thereof. In some embodiments, a domain which upon successful signaling of the CAR induces expression of a cytokine gene is or comprises a transcription factor or functional domain or fragment thereof. In some embodiments, a domain which upon successful signaling of the CAR induces expression of a cytokine gene is or comprises a transcription factor or functional domain or fragment thereof. In some embodiments, a transcription factor or functional domain or fragment thereof is or comprises a nuclear factor of activated T cells (NFAT), an NF-kB, or functional domain or fragment thereof. See, e.g., Zhang. C. et al., Engineering CAR-T cells. Biomarker Research. 5:22 (2017); WO 2016126608; Sha, H. et al. Chimaeric antigen receptor T-cell therapy for tumour immunotherapy. Bioscience Reports Jan. 27, 2017, 37 (1).

[0312] In some embodiments, the CAR further comprises one or more spacers, e.g., wherein the spacer is a first spacer between the antigen binding domain and the transmembrane domain. In some embodiments, the first spacer includes at least a portion of an immunoglobulin constant region or variant or modified version thereof. In some embodiments, the spacer is a second spacer between the transmembrane domain and a signaling domain. In some embodiments, the second spacer is an oligopeptide, e.g., wherein the oligopeptide comprises glycine and serine residues such as but not limited to glycine-serine doublets. In some embodiments, the CAR comprises two or more spacers, e.g., a spacer between the antigen binding domain and the transmembrane domain and a spacer between the transmembrane domain and a signaling domain.

[0313] In some embodiments, any one of the cells described herein comprises a nucleic acid encoding a CAR or a first generation CAR. In some embodiments, a first generation CAR comprises an antigen binding domain, a transmembrane domain, and signaling domain. In some embodiments, a signaling domain mediates downstream signaling during T cell activation.

[0314] In some embodiments, the methods and compositions disclosed herein comprise a nucleic acid encoding a CAR or a second generation CAR. In some embodiments, a second generation CAR comprises an antigen binding domain, a transmembrane domain, and two signaling domains. In some embodiments, a signaling domain mediates downstream signaling during T cell activation. In some embodiments, a signaling domain is a costimulatory domain. In some embodiments, a costimulatory domain enhances cytokine production, CAR-T cell proliferation, and/or CAR-T cell persistence during T cell activation.

[0315] In some embodiments, any one of the compositions and methods described herein comprises a nucleic acid encoding a CAR or a third generation CAR. In some embodiments, a third generation CAR comprises an antigen binding domain, a transmembrane domain, and at least three signaling domains. In some embodiments, a signaling domain mediates downstream signaling during T cell activation. In some embodiments, a signaling domain is a costimulatory domain. In some embodiments, a costimulatory domain enhances cytokine production, CAR-T cell proliferation, and or CAR-T cell persistence during T cell activation. In some embodiments, a third generation CAR comprises at least two costimulatory domains. In some embodiments, the at least two costimulatory domains are not the same.

[0316] In some embodiments, any one of the compositions and methods described herein comprises a nucleic acid encoding a CAR or a fourth generation CAR. In some embodiments, a fourth generation CAR comprises an antigen binding domain, a transmembrane domain, and at least two, three, or four signaling domains. In some embodiments, a signaling domain mediates downstream signaling during T cell activation. In some embodiments, a signaling domain is a costimulatory domain. In some embodiments, a costimulatory domain enhances cytokine production, CAR-T cell proliferation, and or CAR-T cell persistence during T cell activation.

### Abd Comprising an Antibody or Antigen-Binding Portion Thereof

[0317] In some embodiments, a CAR antigen binding domain is or comprises an antibody or antigen-binding portion thereof. In some embodiments, a CAR antigen binding domain is or comprises an scFv or Fab. In some embodiments, a CAR antigen binding domain comprises an scFv or Fab fragment of a CD19 antibody; CD22 antibody; T-cell alpha chain antibody; T-cell β chain antibody; T-cell γ chain antibody; T-cell δ chain antibody; CCR7 antibody; CD3 antibody; CD4 antibody; CD5 antibody; CD7 antibody; CD8 antibody; CD11b antibody; CD11c antibody; CD16 antibody; CD20 antibody; CD21 antibody; CD25 antibody; CD28 antibody; CD34 antibody; CD35 antibody; CD40 antibody; CD45RA antibody; CD45RO antibody; CD52 antibody; CD56 antibody; CD62L antibody; CD68 antibody; CD80 antibody; CD95 antibody; CD117 antibody; CD127 antibody; CD133 antibody; CD137 (4-1 BB) antibody; CD163 antibody; F4/80 antibody; IL-4Ra antibody; Sca-1 antibody; CTLA-4 antibody; GITR antibody GARP antibody; LAP antibody; granzyme B antibody; LFA-1 antibody; MR1 antibody; uPAR antibody; or transferrin receptor antibody.

[0318] In some embodiments, a CAR comprises a signaling domain which is a costimulatory domain. In some embodiments, a CAR comprises a second costimulatory domain. In some embodiments, a CAR comprises at least two costimulatory domains. In some embodiments, a CAR comprises at least three costimulatory domains. In some embodiments, a CAR comprises a costimulatory domain selected from one or more of CD27, CD28, 4-1BB, CD134/OX40, CD30, CD40, PD-1, ICOS, lymphocyte function-associated antigen-1 (LFA-1), CD2, CD7, LIGHT, NKG2C, B7-H3, a ligand that specifically binds with CD83. In some embodiments, if a CAR comprises two or more costimulatory domains, two costimulatory domains are different. In some embodiments, if a CAR comprises two or more costimulatory domains, two costimulatory domains are the same.

[0319] In addition to the CARs described herein, various chimeric antigen receptors and nucleotide sequences encoding the same are known in the art and would be suitable for fusosomal delivery and reprogramming of target cells in vivo and in vitro as described herein. See, e.g., WO2013040557; WO2012079000; WO2016030414; Smith T, et al., Nature Nanotechnology. 2017. DOI: 10.1038/NNANO.2017.57, the disclosures of which are herein incorporated by reference.

### Additional Descriptions of CARS

[0320] In certain embodiments, the compositions and methods comprise a polynucleotide encoding a CAR. CARs (also known as chimeric immunoreceptors, chimeric T cell receptors, or artificial T cell receptors) are receptor proteins that have been engineered to give host cells (e.g., T cells) the new ability to target a specific protein. The receptors are chimeric because they combine both antigen-binding and T cell activating functions into a single receptor. The polycistronic vector of the present disclosure may be used to express one or more CARs in a host cell (e.g., a T cell) for use in therapies against various target antigens. The CARs expressed by the one or more expression cassettes may be the same or different. In these embodiments, the CAR comprises an extracellular binding domain (also referred to as a “binder”) that specifically binds a target antigen, a transmembrane domain, and an intracellular signaling domain. In certain embodiments, the CAR further comprises one or more additional elements, including one or more signal peptides, one or more extracellular hinge domains, and/or one or more intracellular costimulatory domains. Domains may be directly adjacent to one another, or there may be one or more amino acids linking the domains. The nucleotide sequence encoding a CAR may be derived from a mammalian sequence, for example, a mouse sequence, a primate sequence, a human sequence, or combinations thereof. In the cases where the nucleotide sequence encoding a CAR is non-human, the sequence of the CAR may be humanized. The nucleotide sequence encoding a CAR may also be codon-optimized for expression in a mammalian cell, for example, a human cell. In any of these embodiments, the nucleotide sequence encoding a CAR may be at least 80% identical (e.g., at least 80%, at least 85%, at least 90%, at least 95%, at least 96%, at least 97%, at least 98%, at least 99%, or 100% identical) to any of the nucleotide sequences disclosed herein. The sequence variations may be due to codon-optimalization, humanization, restriction enzyme-based cloning scars, and/or additional amino acid residues linking the functional domains, etc.

[0321] In certain embodiments, the CAR comprises a signal peptide at the N-terminus. Non-limiting examples of signal peptides include CD4 signal peptide, IgK signal peptide, and granulocyte-macrophage colony-stimulating factor receptor subunit alpha (GMCSFR-α, also known as colony stimulating factor 2 receptor subunit alpha (CSF2RA)) signal peptide, and variants thereof, the amino acid sequences of which are provided in Table 3 below.

TABLE 3
Exemplary sequences of signal peptides

| SEQ ID | | |
|---|---|---|
| NO: | Sequence | Description |
| 14003 | MALPVTALLLPLALLLHA | CD8α signal |
| | ARP | peptide |
| 14004 | METDTLLLWVLLLWVPGS | IgK signal |
| | TG | peptide |
| 14005 | MLLLVTSLLLCELPHPAF | GMCSFR-α (CSF2RA) |
| | LLIP | signal peptide |

[0322] In certain embodiments, the extracellular binding domain of the CAR comprises one or more antibodies specific to one target antigen or multiple target antigens. The antibody may be an antibody fragment, for example, an scFv, or a single-domain antibody fragment, for example, a VHH. In certain embodiments, the scFv may comprise a heavy chain variable region (V_{H}) and a light chain variable region (V_{L}) of an antibody connected by a linker. The V_{H} and the V_{L} may be connected in either order, i.e., V_{H}-linker-V_{L} or V_{L}-linker-V_{H}. Non-limiting examples of linkers include Whitlow linker, (G4S) n (n can be a positive integer, e.g., 1, 2, 3, 4, 5, 6, etc. (SEQ ID NO: 14127)) linker, and variants thereof. In certain embodiments, the antigen is an antigen that is exclusively or preferentially expressed on tumor cells, or an antigen that is characteristic of an autoimmune or inflammatory disease. Exemplary target antigens include, but are not limited to, CD5, CD19, CD20, CD22, CD23, CD30, CD70, Kappa, Lambda, and B cell maturation agent (BCMA), G-protein coupled receptor family C group 5 member D (GPRC5D) (associated with leukemias); CS1/SLAMF7, CD38, CD138, GPRC5D, TACI, and BCMA (associated with myelomas); GD2, HER2, EGFR, EGFRvIII, B7H3, PSMA, PSCA, CAIX, CD171, CEA, CSPG4, EPHA2, FAP, FRa, IL-13Ra, Mesothelin, MUC1, MUC16, and ROR1 (associated with solid tumors). In any of these embodiments, the extracellular binding domain of the CAR is codon-optimized for expression in a host cell or have variant sequences to increase functions of the extracellular binding domain.

[0323] In certain embodiments, the CAR comprises a hinge domain, also referred to as a spacer. The terms “hinge” and “spacer” may be used interchangeably in the present disclosure. Non-limiting examples of hinge domains include CD4 hinge domain, CD28 hinge domain, IgG4 hinge domain, IgG4 hinge-CH2-CH3 domain, and variants thereof, the amino acid sequences of which are provided in Table 4 below.

TABLE 4
Exemplary sequences of hinge domains

| SEQ ID | | |
|---|---|---|
| NO: | Sequence | Description |
| 14006 | TTTPAPRPPTPAPTI-ASQPLSL | CD8α hinge |
| | RPEACRPAAGGAVHTRGLDFACD | domain |
| 14007 | IEVMYPPPYLDNEKSNGTIIHVK | CD28 hinge |
| | GKHLCP-SPLFPGPSKP | domain |
| 14013 | AAAIEVMYPPPYLDNEKSNGTII | CD28 hinge |
| | HVKGKHLCP-SPLFPGPSKP | domain |
| 14008 | ESKYGPPCPPCP | IgG4 hinge |
| | | domain |
| 14009 | ESKYGPPCPSCP | IgG4 hinge |
| | | domain |
| 14010 | ESKYGPPCPPCPAPEFLGGPSVF | IgG4 hinge- |
| | LFPPKPKD-TLMISRTPEVTCVV | CH2-CH3 |
| | VDVSQEDPEVQFNWY-VDGVEVH | domain |
| | NAKTKPREEQFNSTYRVVSVLTV | |
| | LHQDWLNGKEYKCKVSNKGLPSS | |
| | IEK-TISKAKGQPREPQVYTLPP | |
| | -SQEEMTKNQVSLTCLVKGFYPS | |
| | DIAVEWESNGQPENNYKTTPPVL | |
| | DSDGSFFLYSRL-TVDKSRWQEG | |
| | NVFSCSVM-HEALHNHYTQKSLS | |
| | LSLGK | |

[0324] In certain embodiments, the transmembrane domain of the CAR comprises a transmembrane region of the alpha, beta, or zeta chain of a T cell receptor, CD28, CD38, CD45, CD4, CD5, CD8, CD9, CD16, CD22, CD33, CD37, CD64, CD80, CD86, CD134, CD137, CD154, or a functional variant thereof, including the human versions of each of these sequences. In other embodiments, the transmembrane domain comprises a transmembrane region of CD4, 4-1BB/CD137, CD28, CD34, CD8α, CD8β, FcεRIγ, CD16, OX40/CD134, CD3ζ, CD3ε, CD3γ, CD3δ, TCRα, TCRβ, TCRζ, CD32, CD64, CD64, CD45, CD5, CD9, CD22, CD37, CD80, CD86, CD40, CD40L/CD154, VEGFR2, FAS, and FGFR2B, or a functional variant thereof, including the human versions of each of these sequences. Table 5 provides the amino acid sequences of a few exemplary transmembrane domains.

TABLE 5
Exemplary sequences of transmembrane domains

| SEQ ID | | |
|---|---|---|
| NO: | Sequence | Description |
| 14011 | IYIWAPLAGTCGVL | CD8α |
| | LLSLVITLYC | transmembrane |
| | | domain |
| 14012 | FWVLVVVGGVLACY | CD28 |
| | SLLVTVAFIIFWV | transmembrane |
| | | domain |
| 14014 | MFWVLVVVGGVLAC | CD28 |
| | YSLLVTVAFIIFWV | transmembrane |
| | | domain |

[0325] In certain embodiments, the intracellular signaling domain and/or intracellular costimulatory domain of the CAR comprises one or more signaling domains selected from B7-1/CD80, B7-2/CD86, B7-H1/PD-L1, B7-H2, B7-H3, B7-H4, B7-H6, B7-H7, BTLA/CD272, CD28, CTLA-4, Gi24/VISTA/B7-H5, ICOS/CD278, PD-1, PD-L2/B7-DC, PDCD6, 4-1BB/TNFSF9/CD137, 4-1BB Ligand/TNFSF9, BAFF/BLyS/TNFSF13B, BAFF R/TNFRSF13C, CD27/TNFRSF7, CD27 Ligand/TNFSF7, CD30/TNFRSF8, CD30 Ligand/TNFSF8, CD40/TNFRSF5, CD40/TNFSF5, CD40 Ligand/TNFSF5, DR3/TNFRSF25, GITR/TNFRSF18, GITR Ligand/TNFSF18, HVEM/TNFRSF14, LIGHT/TNFSF14, Lymphotoxin-alpha/TNFβ, OX40/TNFRSF4, OX40 Ligand/TNFSF4, RELT/TNFRSF19L, TACI/TNFRSF13B, TL1A/TNFSF15, TNFα, TNF RII/TNFRSF1B, 2B4/CD244/SLAMF4, BLAME/SLAMF8, CD2, CD2F-10/SLAMF9, CD48/SLAMF2, CD58/LFA-3, CD84/SLAMF5, CD229/SLAMF3, CRACC/SLAMF7, NTB-A/SLAMF6, SLAM/CD150, CD2, CD7, CD53, CD82/Kai-1, CD90/Thyl, CD96, CD160, CD200, CD300a/LMIR1, HLA Class I, HLA-DR, Ikaros, Integrin alpha 4/CD49d, Integrin alpha 4 beta 1, Integrin alpha 4 beta 7/LPAM-1, LAG-3, TCL1A, TCL1B, CRTAM, DAP12, Dectin-1/CLEC7A, DPPIV/CD26, EphB6, TIM-1/KIM-1/HAVCR, TIM-4, TSLP, TSLP R, lymphocyte function associated antigen-1 (LFA-1), NKG2C, CD3ζ, an immunoreceptor tyrosine-based activation motif (ITAM), CD27, CD28, 4-1BB, CD134/OX40, CD30, CD40, PD-1, ICOS, lymphocyte function-associated antigen-1 (LFA-1), CD2, CD7, LIGHT, NKG2C, B7-H3, a ligand that specifically binds with CD83, and a functional variant thereof including the human versions of each of these sequences. In some embodiments, the intracellular signaling domain and/or intracellular costimulatory domain comprises one or more signaling domains selected from a CD37 domain, an ITAM, a CD28 domain, 4-1BB domain, or a functional variant thereof. Table 6 provides the amino acid sequences of a few exemplary intracellular costimulatory and/or signaling domains. In certain embodiments, as in the case of tisagenlecleucel as described below, the CD34 signaling domain of SEQ ID NO:14017 has a mutation, e.g., a glutamine (Q) to lysine (K) mutation, at amino acid position 14 (see SEQ ID NO:14018).

TABLE 6
Exemplary sequences of intracellular
costimulatory and/or signaling domains

| SEQ ID | | |
|---|---|---|
| NO: | Sequence | Description |
| 14015 | KRGRKKLLY-IFKQPFMRPVQ | 4-1BB costimulatory |
| | TTQEEDGCSCRF-PEEEEGGC | domain |
| | EL | |
| 14016 | RSKRS-RLLHSDYMNMTPRR | CD28 costimulatory |
| | PGPTRKHYQPYAPPRDFAAY | domain |
| | RS | |
| 14017 | RVKFSRSADAPA-YQQGQNQ | CD3ζ signaling |
| | LYNELNLGR-REEYDVLDKR | domain |
| | RGRDPEMGGKPRR-KNPQEG | |
| | LYNEL-QKDKMAEAYSEIGM | |
| | KGERRRGKGHDGLYQGLSTA | |
| | TKDTYDALHMQALPPR | |
| 14018 | RVKFSRSADAPA-YKQGQNQ | CD3ζ signaling |
| | LYNELNLGR-REEYDVLDKR | domain |
| | RGRDPEMGGKPRR-KNPQEG | (with Q to K |
| | LYNEL-QKDKMAEAYSEIGM | mutation at |
| | KGERRRGKGHDGLYQGLSTA | position 14) |
| | TKDTYDALHMQALPPR | |

[0326] In certain embodiments where the polycistronic vector encodes two or more CARs, the two or more CARs comprise the same functional domains, or one or more different functional domains, as described. For example, the two or more CARs comprise different signal peptides, extracellular binding domains, hinge domains, transmembrane domains, costimulatory domains, and/or intracellular signaling domains, in order to minimize the risk of recombination due to sequence similarities. Or, alternatively, the two or more CARs comprise the same domains. In the cases where the same domain(s) and/or backbone are used, it is optional to introduce codon divergence at the nucleotide sequence level to minimize the risk of recombination.

### CD19 CAR

[0327] In some embodiments, the CAR is a CD19 CAR (“CD19-CAR”), and in these embodiments, the polycistronic vector comprises an expression cassette that contains a nucleotide sequence encoding a CD19 CAR. In some embodiments, the CD19 CAR comprises a signal peptide, an extracellular binding domain that specifically binds CD19, a hinge domain, a transmembrane domain, an intracellular costimulatory domain, and/or an intracellular signaling domain in tandem.

[0328] In some embodiments, the signal peptide of the CD19 CAR comprises a CD4 signal peptide. In some embodiments, the CD4 signal peptide comprises or consists of an amino acid sequence set forth in SEQ ID NO:14003 or an amino acid sequence that is at least 80% identical (e.g., at least 80%, at least 85%, at least 90%, at least 95%, at least 96%, at least 97%, at least 98%, at least 99%, or 100% identical) to the amino acid sequence set forth in of SEQ ID NO:14003. In some embodiments, the signal peptide comprises an IgK signal peptide. In some embodiments, the IgK signal peptide comprises or consists of an amino acid sequence set forth in SEQ ID NO: 14004 or an amino acid sequence that is at least 80% identical (e.g., at least 80%, at least 85%, at least 90%, at least 95%, at least 96%, at least 97%, at least 98%, at least 99%, or 100% identical) to the amino acid sequence set forth in of SEQ ID NO: 14004. In some embodiments, the signal peptide comprises a GMCSFR-α or CSF2RA signal peptide. In some embodiments, the GMCSFR-α or CSF2RA signal peptide comprises or consists of an amino acid sequence set forth in SEQ ID NO: 14005 or an amino acid sequence that is at least 80% identical (e.g., at least 80%, at least 85%, at least 90%, at least 95%, at least 96%, at least 97%, at least 98%, at least 99%, or 100% identical) to the amino acid sequence set forth in of SEQ ID NO: 14005.

[0329] In some embodiments, the extracellular binding domain of the CD19 CAR is specific to CD19, for example, human CD19. The extracellular binding domain of the CD19 CAR can be codon-optimized for expression in a host cell or to have variant sequences to increase functions of the extracellular binding domain. In some embodiments, the extracellular binding domain comprises an immunogenically active portion of an immunoglobulin molecule, for example, an scFv.

[0330] In some embodiments, the extracellular binding domain of the CD19 CAR comprises an scFv derived from the FMC63 monoclonal antibody (FMC63), which comprises the heavy chain variable region (V_{H}) and the light chain variable region (V_{L}) of FMC63 connected by a linker. FMC63 and the derived scFv have been described in Nicholson et al., Mol. Immun. 34(16-17): 1157-1165 (1997) and PCT Application Publication No. WO2018/213337. In some embodiments, the amino acid sequences of the entire FMC63-derived scFv (also referred to as FMC63 scFv) and its different portions are provided in Table 7 below. In some embodiments, the CD19-specific scFv comprises or consists of an amino acid sequence set forth in SEQ ID NO: 14019, 14020, or 14025, or an amino acid sequence that is at least 80% identical (e.g., at least 80%, at least 85%, at least 90%, at least 95%, at least 96%, at least 97%, at least 98%, at least 99%, or 100% identical) to the amino acid sequence set forth in SEQ ID NO:14019, 14020, or 14025. In some embodiments, the CD19-specific scFv comprises one or more CDRs having amino acid sequences set forth in SEQ ID NOs: 14021-14023 and 14026-14028. In some embodiments, the CD19-specific scFv comprises a light chain with one or more CDRs having amino acid sequences set forth in SEQ ID NOs: 14021-14023. In some embodiments, the CD19-specific scFv comprises a heavy chain with one or more CDRs having amino acid sequences set forth in SEQ ID NOs: 14026-14028. In any of these embodiments, the CD19-specific scFv comprises one or more CDRs comprising one or more amino acid substitutions, or comprising a sequence that is at least 80% identical (e.g., at least 80%, at least 85%, at least 90%, at least 95%, at least 96%, at least 97%, at least 98%, at least 99%, or 100% identical), to any of the sequences identified. In some embodiments, the extracellular binding domain of the CD19 CAR comprises or consists of the one or more CDRs as described herein.

[0331] In some embodiments, the linker linking the V_{H} and the V_{L} portions of the scFv is a Whitlow linker having an amino acid sequence set forth in SEQ ID NO:14024. In some embodiments, the Whitlow linker is replaced by a different linker, for example, a 3×G4S linker (SEQ ID NO: 9313) having an amino acid sequence set forth in SEQ ID NO: 14030, which gives rise to a different FMC63-derived scFv having an amino acid sequence set forth in SEQ ID NO:14029. In certain of these embodiments, the CD19-specific scFv comprises or consists of an amino acid sequence set forth in SEQ ID NO:14029 or an amino acid sequence that is at least 80% identical (e.g., at least 80%, at least 85%, at least 90%, at least 95%, at least 96%, at least 97%, at least 98%, at least 99%, or 100% identical) to the amino acid sequence set forth in of SEQ ID NO:14029.

TABLE 7
Exemplary sequences of anti-CD19 scFv and components

| SEQ ID NO: | Amino Acid Sequence | Description |
|---|---|---|
| 14019 | DIQMTQTTSSLSASLGDRVTIS- | Anti-CD19 FMC63 scFv |
| | CRASQDISKY-LNWYQQKPDGT | entire sequence, with |
| | VKLLI-YHTSRLHSGVPSRFSG | Whitlow linker |
| | SGSGTDYSLTISNLEQEDIATY | |
| | FCQQGN-TLPYTFGGGTKLEIT- | |
| | GSTSGSGKPGSGEGSTKGEV-K | |
| | LQESGPGLVAPSQSLSVTCTVS | |
| | GVSLPDYGVSWIRQP-PRKGLE | |
| | LGVIWGSET-TYYNSALKSRLT | |
| | IIKDNSKSQVFLK-MNSLQTDD | |
| | TAIYYCAKHYYYGGSYAMDYWG | |
| | QGTSVTVSS | |
| 14020 | DIQMTQTTSSLSASLGDRVTIS- | Anti-CD19 FMC63 scFv |
| | CRASQDISKY-LNWYQQKPDGTV | light chain variable |
| | KLLI-YHTSRLHSGVPSRFSGSG | region |
| | SGTDYSLTISNLEQEDIATYFCQ | |
| | QGN-TLPYTFGGGTKLEIT | |
| 14021 | QDISKY | Anti-CD19 FMC63 scFv |
| | | light chain CDR1 |
| | HTS | Anti-CD19 FMC63 scFv |
| | | light chain CDR2 |
| 14023 | QQGNTLPYT | Anti-CD19 FMC63 scFv |
| | | light chain CDR3 |
| 14024 | GSTSGSGKPGSGEGSTKG | Whitlow linker |
| 14025 | EVKLQESGPGLVAP-SQSLSV | Anti-CD19 FMC63 scFv |
| | TCTVSGVSLPDY-GVSWIRQP- | heavy chain variable |
| | PRKGLEWLGVIWGSET-TYYN | region |
| | SALKSRLTIIKDNSKSQVFLK | |
| | MNSLQTDD-TAIYYCAKHYYY | |
| | GGSYAMDYWGQGTSVTVSS | |
| 14026 | GVSLPDYG | Anti-CD19 FMC63 scFv |
| | | heavy chain CDR1 |
| 14027 | IWGSETT | Anti-CD19 FMC63 scFv |
| | | heavy chain CDR2 |
| 14028 | AKHYYYGGSYAMDY | Anti-CD19 FMC63 scFv |
| | | heavy chain CDR3 |
| 14029 | DIQMTQTTSSLSASLGDRVTIS- | Anti-CD19 FMC63 scFv |
| | CRASQDISKY-LNWYQQKPDGT | entire sequence, with |
| | VKLLI-YHTSRLHSGVPSRFSG | 3xG₄S linker (SEQ ID |
| | SGSGTDYSLTISNLEQEDIATY | NO: 9313) |
| | FCQQGN-TLPYTFGGGTKLEIT- | |
| | GGGGSGGGGSGGGGSEV-KLQE | |
| | SGPGLVAPSQSLSVTCTVSGVS | |
| | LPDYGVSWIRQP-PRKGLEWLG | |
| | VIWGSET-TYYNSALKSRLTII | |
| | KDNSKSQVFLK-MNSLQTDDTA | |
| | IYYCAKHYYYGGSYAMDYWGQG | |
| | TSVTVSS | |
| 14030 | GGGGSGGGGSGGGGS | 3xG₄S linker |

[0332] In some embodiments, the extracellular binding domain of the CD19 CAR is derived from an antibody specific to CD19, including, for example, SJ25C1 (Bejcek et al., Cancer Res. 55:2346-2351 (1995)), HD37 (Pezutto et al., J. Immunol. 138(9):2793-2799 (1987)), 4G7 (Meeker et al., Hybridoma 3:305-320 (1984)), B43 (Bejcek (1995)), BLY3 (Bejcek (1995)), B4 (Freedman et al., 70:418-427 (1987)), B4 HB12b (Kansas & Tedder, J. Immunol. 147:4094-4102 (1991); Yazawa et al., Proc. Natl. Acad. Sci. USA 102:15178-15183 (2005); Herbst et al., J. Pharmacol. Exp. Ther. 335:213-222 (2010)), BU12 (Callard et al., J. Immunology, 148(10):2983-2987 (1992)), and CLB-CD19 (De Rie Cell. Immunol. 118:368-381 (1989)). In any of these 10 embodiments, the extracellular binding domain of the CD19 CAR comprises or consists of the V_{H}, the V_{L}, and/or one or more CDRs of any of the antibodies.

[0333] In some embodiments, the hinge domain of the CD19 CAR comprises a CD4 hinge domain, for example, a human CD4 hinge domain. In some embodiments, the CD4 hinge domain comprises or consists of an amino acid sequence set forth in SEQ ID NO: 14006 or an amino acid sequence that is at least 80% identical (e.g., at least 80%, at least 85%, at least 90%, at least 95%, at least 96%, at least 97%, at least 98%, at least 99%, or 100% identical) to the amino acid sequence set forth in of SEQ ID NO: 14006. In some embodiments, the hinge domain comprises a CD28 hinge domain, for example, a human CD28 hinge domain. In some embodiments, the CD28 hinge domain comprises or consists of an amino acid sequence set forth in SEQ ID NO:14007 or an amino acid sequence that is at least 80% identical (e.g., at least 80%, at least 85%, at least 90%, at least 95%, at least 96%, at least 97%, at least 98%, at least 99%, or 100% identical) to the amino acid sequence set forth in of SEQ ID NO:14007. In some embodiments, the hinge domain comprises an IgG4 hinge domain, for example, a human IgG4 hinge domain. In some embodiments, the IgG4 hinge domain comprises or consists of an amino acid sequence set forth in SEQ ID NO:14008 or SEQ ID NO:14009, or an amino acid sequence that is at least 80% identical (e.g., at least 80%, at least 85%, at least 90%, at least 95%, at least 96%, at least 97%, at least 98%, at least 99%, or 100% identical) to the amino acid sequence set forth in of SEQ ID NO: 14008 or SEQ ID NO: 14009. In some embodiments, the hinge domain comprises a IgG4 hinge-Ch2-Ch3 domain, for example, a human IgG4 hinge-Ch2-Ch3 domain. In some embodiments, the IgG4 hinge-Ch2-Ch3 domain comprises or consists of an amino acid sequence set forth in SEQ ID NO: 14010 or an amino acid sequence that is at least 80% identical (e.g., at least 80%, at least 85%, at least 90%, at least 95%, at least 96%, at least 97%, at least 98%, at least 99%, or 100% identical) to the amino acid sequence set forth in of SEQ ID NO: 14010.

[0334] In some embodiments, the transmembrane domain of the CD19 CAR comprises a CD4 transmembrane domain, for example, a human CD4 transmembrane domain. In some embodiments, the CD4 transmembrane domain comprises or consists of an amino acid sequence set forth in SEQ ID NO: 14011 or an amino acid sequence that is at least 80% identical (e.g., at least 80%, at least 85%, at least 90%, at least 95%, at least 96%, at least 97%, at least 98%, at least 99%, or 100% identical) to the amino acid sequence set forth in SEQ ID NO: 14011. In some embodiments, the transmembrane domain comprises a CD28 transmembrane domain, for example, a human CD28 transmembrane domain. In some embodiments, the CD28 transmembrane domain comprises or consists of an amino acid sequence set forth in SEQ ID NO: 14012 or an amino acid sequence that is at least 80% identical (e.g., at least 80%, at least 85%, at least 90%, at least 95%, at least 96%, at least 97%, at least 98%, at least 99%, or 100% identical) to the amino acid sequence set forth in SEQ ID NO: 14012.

[0335] In some embodiments, the intracellular costimulatory domain of the CD19 CAR comprises a 4-1BB costimulatory domain. 4-1BB, also known as CD137, transmits a potent costimulatory signal to T cells, promoting differentiation and enhancing long-term survival of T lymphocytes. In some embodiments, the 4-1BB costimulatory domain is human. In some embodiments, the 4-1BB costimulatory domain comprises or consists of an amino acid sequence set forth in SEQ ID NO: 14015 or an amino acid sequence that is at least 80% identical (e.g., at least 80%, at least 85%, at least 90%, at least 95%, at least 96%, at least 97%, at least 98%, at least 99%, or 100% identical) to the amino acid sequence set forth in SEQ ID NO: 14015. In some embodiments, the intracellular costimulatory domain comprises a CD28 costimulatory domain. CD28 is another co-stimulatory molecule on T cells. In some embodiments, the CD28 costimulatory domain is human. In some embodiments, the CD28 costimulatory domain comprises or consists of an amino acid sequence set forth in SEQ ID NO: 14016 or an amino acid sequence that is at least 80% identical (e.g., at least 80%, at least 85%, at least 90%, at least 95%, at least 96%, at least 97%, at least 98%, at least 99%, or 100% identical) to the amino acid sequence set forth in SEQ ID NO: 14016. In some embodiments, the intracellular costimulatory domain of the CD19 CAR comprises a 4-1BB costimulatory domain and a CD28 costimulatory domain as described.

[0336] In some embodiments, the intracellular signaling domain of the CD19 CAR comprises a CD3 zeta (2) signaling domain. CD37 associates with T cell receptors (TCRs) to produce a signal and contains immunoreceptor tyrosine-based activation motifs (ITAMs). The CD37 signaling domain refers to amino acid residues from the cytoplasmic domain of the zeta chain that are sufficient to functionally transmit an initial signal necessary for T cell activation. In some embodiments, the CD3ζ signaling domain is human. In some embodiments, the CD37 signaling domain comprises or consists of an amino acid sequence set forth in SEQ ID NO: 14017 or an amino acid sequence that is at least 80% identical (e.g., at least 80%, at least 85%, at least 90%, at least 95%, at least 96%, at least 97%, at least 98%, at least 99%, or 100% identical) to the amino acid sequence set forth in SEQ ID NO: 14017.

[0337] In some embodiments, the polycistronic vector comprises an expression cassette that contains a nucleotide sequence encoding a CD19 CAR, including, for example, a CD19 CAR comprising the CD19-specific scFv having sequences set forth in SEQ ID NO: 14019 or SEQ ID NO: 14029, the CD4 hinge domain of SEQ ID NO:14006, the CD4 transmembrane domain of SEQ ID NO: 14011, the 4-1BB costimulatory domain of SEQ ID NO: 14015, the CD34 signaling domain of SEQ ID NO: 14017, and/or variants (i.e., having a sequence that is at least 80% identical, for example, at least 80%, at least 85%, at least 90%, at least 95%, at least 96%, at least 97%, at least 98%, or at least 99 identical to the disclosed sequence) thereof. In any of these embodiments, the CD19 CAR additionally comprises a signal peptide (e.g., a CD4 signal peptide) as described.

[0338] In some embodiments, the polycistronic vector comprises an expression cassette that contains a nucleotide sequence encoding a CD19 CAR, including, for example, a CD19 CAR comprising the CD19-specific scFv having sequences set forth in SEQ ID NO: 14019 or SEQ ID NO: 14029, the IgG4 hinge domain of SEQ ID NO:14008 or SEQ ID NO: 14009, the CD28 transmembrane domain of SEQ ID NO:14012, the 4-1 BB costimulatory domain of SEQ ID NO: 14015, the CD37 signaling domain of SEQ ID NO: 14017, and/or variants (i.e., having a sequence that is at least 80% identical, for example, at least 80%, at least 85%, at least 90%, at least 95%, at least 96%, at least 97%, at least 98%, or at least 99 identical to the disclosed sequence) thereof. In any of these embodiments, the CD19 CAR additionally comprises a signal peptide (e.g., a CD4 signal peptide) as described.

[0339] In some embodiments, the polycistronic vector comprises an expression cassette that contains a nucleotide sequence encoding a CD19 CAR, including, for example, a CD19 CAR comprising the CD19-specific scFv having sequences set forth in SEQ ID NO: 14019 or SEQ ID NO: 14029, the CD28 hinge domain of SEQ ID NO: 14007, the CD28 transmembrane domain of SEQ ID NO: 14012, the CD28 costimulatory domain of SEQ ID NO: 14016, the CD33 signaling domain of SEQ ID NO: 14017, and/or variants (i.e., having a sequence that is at least 80% identical, for example, at least 80%, at least 85%, at least 90%, at least 95%, at least 96%, at least 97%, at least 98%, or at least 99 identical to the disclosed sequence) thereof. In any of these embodiments, the CD19 CAR additionally comprises a signal peptide (e.g., a CD4 signal peptide) as described.

[0340] In some embodiments, the polycistronic vector comprises an expression cassette that contains a nucleotide sequence encoding a CD19 CAR as set forth in SEQ ID NO: 14031 or is at least 80% identical (e.g., at least 80%, at least 85%, at least 90%, at least 95%, at least 96%, at least 97%, at least 98%, at least 99%, or 100% identical) to the nucleotide sequence set forth in SEQ ID NO: 14031 (see Table 8). The encoded CD19 CAR has a corresponding amino acid sequence set forth in SEQ ID NO: 14032 or is at least 80% identical (e.g., at least 80%, at least 85%, at least 90%, at least 95%, at least 96%, at least 97%, at least 98%, at least 99%, or 100% identical) to the amino acid sequence set forth in of SEQ ID NO: 14032, with the following components: CD4 signal peptide, FMC63 scFv (V_{L}-Whitlow linker-V_{H}), CD4 hinge domain, CD4 transmembrane domain, 4-1BB costimulatory domain, and CD3ζ signaling domain.

[0341] In some embodiments, the polycistronic vector comprises an expression cassette that contains a nucleotide sequence encoding a commercially available embodiment of CD19 CAR. Non-limiting examples of commercially available embodiments of CD19 CARs expressed and/or encoded by T cells include tisagenlecleucel, lisocabtagene maraleucel, axicabtagene ciloleucel, and brexucabtagene autoleucel.

[0342] In some embodiments, the polycistronic vector comprises an expression cassette that contains a nucleotide sequence encoding tisagenlecleucel or portions thereof. Tisagenlecleucel comprises a CD19 CAR with the following components: CD4 signal peptide, FMC63 scFv (V_{L}-3×G4S linker-V_{H}), CD4 hinge domain, CD4 transmembrane domain, 4-1BB costimulatory domain, and CD37 signaling domain. The nucleotide and amino acid sequence of the CD19 CAR in tisagenlecleucel are provided in Table 8, with annotations of the sequences provided in Table 9.

[0343] In some embodiments, the polycistronic vector comprises an expression cassette that contains a nucleotide sequence encoding lisocabtagene maraleucel or portions thereof. Lisocabtagene maraleucel comprises a CD19 CAR with the following components: GMCSFR-α or CSF2RA signal peptide, FMC63 scFv (V_{L}-Whitlow linker-V_{H}), IgG4 hinge domain, CD28 transmembrane domain, 4-1BB costimulatory domain, and CD37 signaling domain. The nucleotide and amino acid sequence of the CD19 CAR in lisocabtagene maraleucel are provided in Table 8, with annotations of the sequences provided in Table 10.

[0344] In some embodiments, the polycistronic vector comprises an expression cassette that contains a nucleotide sequence encoding axicabtagene ciloleucel or portions thereof. Axicabtagene ciloleucel comprises a CD19 CAR with the following components: GMCSFR-α or CSF2RA signal peptide, FMC63 scFv (V_{L}-Whitlow linker-V_{H}), CD28 hinge domain, CD28 transmembrane domain, CD28 costimulatory domain, and CD33 signaling domain. The nucleotide and amino acid sequence of the CD19 CAR in axicabtagene ciloleucel are provided in Table 8, with annotations of the sequences provided in Table 11.

[0345] In some embodiments, the polycistronic vector comprises an expression cassette that contains a nucleotide sequence encoding brexucabtagene autoleucel or portions thereof. Brexucabtagene autoleucel comprises a CD19 CAR with the following components: GMCSFR-α signal peptide, FMC63 scFv, CD28 hinge domain, CD28 transmembrane domain, CD28 costimulatory domain, and CD3ζ signaling domain.

[0346] In some embodiments, the polycistronic vector comprises an expression cassette that contains a nucleotide sequence encoding a CD19 CAR as set forth in SEQ ID NO: 14033, 14035, or 14037, or is at least 80% identical (e.g., at least 80%, at least 85%, at least 90%, at least 95%, at least 96%, at least 97%, at least 98%, at least 99%, or 100% identical) to the nucleotide sequence set forth in SEQ ID NO: 14033, 14035, or 14037. The encoded CD19 CAR has a corresponding amino acid sequence set forth in SEQ ID NO: 14034, 14036, or 14038, respectively, or is at least 80% identical (e.g., at least 80%, at least 85%, at least 90%, at least 95%, at least 96%, at least 97%, at least 98%, at least 99%, or 100% identical) to the amino acid sequence set forth in of SEQ ID NO: 14034, 14036, or 14038, respectively.

TABLE 8
Exemplary sequences of CD19 CARs

| SEQ ID NO: | Sequence | Description |
|---|---|---|
| 14031 | atggccttaccagtgaccgccttgctcctgccgct | Exemplary CD19 |
| | ggcctt-gctgctccac-gccgccaggccggacat | CAR nucleotide |
| | ccagatgacacagactacatcctccctgtctgcct | sequence |
| | ctctgggagacagagtcaccatcagtt-gcagggc | |
| | aagtcaggacatt-agtaaatatttaaattggtat | |
| | cagcagaaaccagatggaactgttaaactcctgat | |
| | ctaccatacatcaagattacactcag-gagtccca | |
| | tcaaggttcag-tggcagtgggtctggaacagatt | |
| | attctctcaccattagcaacctggagcaagaagat | |
| | attgccacttactttt-gccaacagggtaatacgc | |
| | ttccgtacac-gttcggaggggggaccaagctgga | |
| | gatcacaggctccacctctggatccggcaagcccg | |
| | -gatctggcgagggatccaccaagggcgaggtgaa | |
| | actg-cag-gagtcaggacctggcctggtggcgcc | |
| | ctcacagagcctgtccgtcacatgcactgtctcag | |
| | gggtctcattacccgac-tatggtgtaagctggat | |
| | -tcgccagcctccacgaaagggtctggagtggctg | |
| | ggagtaatatggggtagtgaaaccacatacta-ta | |
| | attcagctctcaaatccagactgac-catcatcaa | |
| | ggacaactccaagagccaagttttcttaaaaatga | |
| | acagtctg-caaactgatgacacagccatttacta | |
| | ctgtgccaaacattattactacggtggtagctatg | |
| | ctatggac-tactggggccaaggaacctcagtcac | |
| | -cgtctcctcaaccacgacgccagcgccgcgacca | |
| | ccaacaccggcgcccaccatcgcgtcg-cagcccc | |
| | tgtccctgcgcccagaggcgtgccggccagcggcg | |
| | gggggcgcagtgcacacgagggggctg-gacttcg | |
| | cctgtga-tatctacatctgggcgcccttggccgg | |
| | gacttgtggggtccttctcctgtcactggttatca | |
| | ccctttactgcaaacgggg-cagaaagaaactcct | |
| | gtata-tattcaaacaaccatttatgagaccagta | |
| | caaactactcaagaggaagatggctgtagctgccg | |
| | atttccagaagaa-gaagaaggaggatgtgaactg | |
| | agag-tgaagttcagcaggagcgcagacgcccccg | |
| | cgtaccagcagggccagaaccagctctataacgag | |
| | ctcaatctag-gacgaagagaggagtacgatgttt | |
| | t-ggacaagagacgtggccgggaccctgagatggg | |
| | gggaaagccgagaaggaagaaccctcaggaaggcc | |
| | tg-tacaatgaactgcagaaagataa-gatggcgg | |
| | aggcctacagtgagattgggatgaaaggcgagcgc | |
| | cggaggggcaaggggcacgatggcctttac-cagg | |
| | gtctcagtacagccac-caaggacacctacgacgc | |
| | ccttcacatgcaggccctgccccctcgc | |
| 14032 | MAL-PVTALLLPLALLLHAARPDIQMTQTTSSLSA | Exemplary CD19 |
| | SLGDRVTISCRASQDISKY-LNWYQQKPDGTVKLL | CAR amino acid |
| | I-YHTSRLHSGVPSRFSGSGSGTDYS-LTISNLEQ | sequence |
| | EDIATYFCQQGNTLPYTFGGGTKLEITGSTSGSGK | |
| | PGSGEGSTKGEV-KLQESGPGLVAP-SQSLSVTCT | |
| | VSGVSLPDY-GVSWIRQPPRKGLEWLGVIWGSETT | |
| | YYNSALKSRLTIIKDNSKSQVFLKMNSLQTDD-TA | |
| | IYYCAKHYYYGGSYAMDYWGQGTSVTVSSTTTPAP | |
| | RPPTPAPTI-ASQPLSLRPEACRPAAGGAVHTRGL | |
| | D-FACDIYIWAPLAG-TCGVLLLSLVITLYCKRGR | |
| | KKLLYIFKQPFMRPVQTTQEEDGCSCRFPEEEE-G | |
| | GCELRVKFSRSADAPA-YQQGQNQLYNELNLGR-R | |
| | EEYDVLDKRRGRDPEMGGKPRRKNPQEGLYNEL-Q | |
| | KDKMAEAYSEIGMKGERRRGKGH-DGLYQGLSTAT | |
| | KDTYDALHMQALPPR | |
| 14033 | atggccttaccagtgaccgccttgctcctgccgct | Tisagenlecleucel |
| | ggcctt-gctgctccac-gccgccaggccggacat | CD19 CAR |
| | ccagatgacacagactacatcctccctgtctgcct | nucleotide |
| | ctctgggagacagagtcaccatcagtt-gcagggc | sequence |
| | aagtcaggacatt-agtaaatatttaaattggtat | |
| | cagcagaaaccagatggaactgttaaactcctgat | |
| | ctaccatacatcaagattacactcag-gagtccca | |
| | tcaaggttcag-tggcagtgggtctggaacagatt | |
| | attctctcaccattagcaacctggagcaagaagat | |
| | attgccacttactttt-gccaacagggtaatacgc | |
| | ttccgtacac-gttcggaggggggaccaagctgga | |
| | gatcacaggtggcggtggctcgggcggtggtgggt | |
| | cgggtggcggcg-gatctgaggtgaaactgcagga | |
| | gtcag-gacctggcctggtggcgccctcacagagc | |
| | ctgtccgtcacatgcactgtctcaggggtctcatt | |
| | acccgactatggtgtaa-gctggattcgccagcct | |
| | ccac-gaaagggtctggagtggctgggagtaatat | |
| | ggggtagtgaaaccacatactataattcagctctc | |
| | aaatccagactgac-catcatcaaggacaactcca | |
| | a-gagccaagttttcttaaaaatgaacagtctgca | |
| | aactgatgacacagccatttactactgtgccaaac | |
| | attattactac-ggtggtagctatgctatggac-t | |
| | actggggccaaggaacctcagtcaccgtctcctca | |
| | accacgacgccagcgccgcgaccaccaacac-cgg | |
| | cgcccaccatcgcgtcg-cagcccctgtccctgcg | |
| | cccagaggcgtgccggccagcggcggggggcgcag | |
| | tgcacacgagggggctg-gacttcgcctgtga-ta | |
| | tctacatctgggcgcccttggccgggacttgtggg | |
| | gtccttctcctgtcactggttatcaccctttactg | |
| | caaacgggg-cagaaagaaactcctgtata-tatt | |
| | caaacaaccatttatgagaccagtacaaactactc | |
| | aagaggaagatggctgtagctgccgatttccagaa | |
| | gaa-gaagaaggaggatgtgaactgagag-tgaag | |
| | ttcagcaggagcgcagacgcccccgcgtacaagca | |
| | gggccagaaccagctctataacgagctcaatctag | |
| | -gacgaagagaggagtacgatgtttt-ggacaaga | |
| | gacgtggccgggaccctgagatggggggaaagccg | |
| | agaaggaagaaccctcaggaaggcctg-tacaatg | |
| | aactgcagaaagataa-gatggcggaggcctacag | |
| | tgagattgggatgaaaggcgagcgccggaggggca | |
| | aggggcacgatggcctttac-cagggtctcagtac | |
| | agccac-caaggacacctacgacgcccttcacatg | |
| | caggccctgccccctcgc | |
| 14034 | MAL-PVTALLLPLALLLHAARPDIQMTQTTSSLSA | Tisagenlecleucel |
| | SLGDRVTISCRASQDISKY-LNWYQQKPDGTVKLL | CD19 CAR |
| | I-YHTSRLHSGVPSRFSGSGSGTDYS-LTISNLEQ | amino acid |
| | EDIATYFCQQGNTLPYTFGGGTKLEITGGGGSGGG | sequence |
| | GSGGGGSEV-KLQESGPGLVAP-SQSLSVTCTVSG | |
| | VSLPDYGVSWIRQP-PRKGLEWLGVIWGSETTYYN | |
| | SALKSRLTIIKDNSKSQVFLKMNSLQTDD-TAIYY | |
| | CAKHYYYGGSYAMDYWGQGTSVTVSSTTTPAPRPP | |
| | TPAPTI-ASQPLSLRPEACRPAAGGAVHTRGLD-F | |
| | ACDIYIWAPLAG-TCGVLLLSLVITLYCKRGRKKL | |
| | LYIFKQPFMRPVQTTQEEDGCSCRFPEEEE-GGCE | |
| | LRVKFSRSADAPA-YKQGQNQLYNELNLGR-REEY | |
| | DVLDKRRGRDPEMGGKPRRKNPQEGLYNEL-QKDK | |
| | MAEAYSEIGMKGERRRGKGH-DGLYQGLSTATKDT | |
| | YDALHMQALPPR | |
| 14035 | atgctgctgctggtgac-cagcctgctgctgtgcg | Lisocabtagene |
| | agctgccccaccccgcctttctgctgatccccgac | maraleucel |
| | atccagatgacccagaccac-ctccagcctgagcg | CD19 CAR nucleotide |
| | ccagcctgggcgac-cgggtgaccatcagctgccg | sequence |
| | ggccagccaggacatcagcaagtacctgaactggt | |
| | atcagcagaagcccgacgg-caccgtcaagctgct | |
| | gatctac-cacaccagccggctgcacagcggcgtg | |
| | cccagccggtttagcggcagcggctccggcaccga | |
| | ctacagcctgac-catctccaacctggaacaggaa | |
| | ga-tatcgccacctacttttgccagcagggcaaca | |
| | cactgccctacacctttggcggcggaacaaagctg | |
| | gaaatcaccgg-cagcacctccggcagcggcaa-g | |
| | cctggcagcggcgagggcagcaccaagggcgaggt | |
| | gaagctgcaggaaa-gcggccctggcctggtggcc | |
| | cccagccagagcctgagcgtgacctgcaccgtgag | |
| | cggcgtgagcctgcccgactac-ggcgtgagctgg | |
| | atccgg-cagccccccaggaagggcctggaatggc | |
| | tgggcgtgatctggggcagcgagaccacctactac | |
| | aacagcgccctgaa-gagccggctgac-catcatc | |
| | aaggacaacagcaagagccaggtgttcctgaagat | |
| | gaacagcctgcagaccgacgacac-cgccatctac | |
| | tactgcgccaagcactactactac-ggcggcagct | |
| | acgccatggactactggggccagggcaccagcgtg | |
| | accgtgagcagcgaatctaagtacggac-cgccct | |
| | gcccccctt-gccctatgttctgggtgctggtggt | |
| | ggtcggaggcgtgctggcctgctacagcctgctgg | |
| | tcaccgtggccttcatcatctttt-gggtgaaacg | |
| | gggcagaaa-gaaactcctgtatatattcaaacaa | |
| | ccatttatgagaccagtacaaactactcaagagga | |
| | agatggctgtagctgccgat-ttccagaagaagaa | |
| | gaaggag-gatgtgaactgcgggtgaagttcagca | |
| | gaagcgccgacgcccctgcctaccagcagggccag | |
| | aatcagctgtacaac-gagctgaacctgggcagaa | |
| | gggaa-gagtacgacgtcctggataagcggagagg | |
| | ccgggaccctgagatgggcggcaagcctcggcgga | |
| | agaacccccag-gaaggcctgtataacgaactg-c | |
| | agaaagacaagatggccgaggcctacagcgagatc | |
| | ggcatgaagggcgagcggaggcggggcaagggcca | |
| | c-gacggcctgtatcagggcctgtccac-cgccac | |
| | caaggatacctacgacgccctgcacatgcaggccc | |
| | tgcccccaagg | |
| 14036 | MLLLVTSLLLCELPHPAFL-LIPDIQMTQTTSSLS | Lisocabtagene |
| | ASLGDRVTIS-CRASQDISKY-LNWYQQKPDGTVK | maraleucel |
| | LLIYHTSRLHSGVPSRFSGSGSGTDYSLTISNLEQ | CD19 CAR |
| | EDIATY-FCQQGNTLPYTFGGGTKLEIT-GSTSGS | amino acid |
| | GKPGSGEGSTKGEVKLQESGPGLVAPSQSLSVTCT | sequence |
| | VSGVSLPDY-GVSWIRQPPRKGLEWLGVIWGSET- | |
| | TYYNSALKSRLTIIK-DNSKSQVFLKMNSLQTDDT | |
| | AIYYCAKHYYYGGSYAMDYWGQGTSVTVSSESKYG | |
| | PPCPPCPMFWVLVVVGGVLACYSLLVTVAFI-IFW | |
| | VKRGRKKLLY-IFKQPFMRPVQTTQEEDGCSCRFP | |
| | EEEEGGCELRVKFSRSADAPA-YQQGQNQLYNELN | |
| | LGR-REEYDVLDKRRGRDPEMGGKPRR-KNPQEGL | |
| | YNELQKDKMAEAYSEIGMKGERRRGKGHDGLYQGL | |
| | STAT-KDTYDALHMQALPPR | |
| 14037 | atgcttctcctggtgacaagccttctgctctgtga | Axicabtagene ci- |
| | gttac-cacacccag-cattcctcctgatcccaga | loleucel CD19 |
| | catccagatgacacagactacatcctccctgtctg | CAR nucleotide |
| | cctctctgggagacagagtcac-catcagttgcag | sequence |
| | ggcaagtcag-gacattagtaaatatttaaattgg | |
| | tatcagcagaaaccagatggaactgttaaactcct | |
| | gatctaccatacatcaagat-tacactcaggag-t | |
| | cccatcaaggttcagtggcagtgggtctggaacag | |
| | attattctctcaccattagcaacctggagcaagaa | |
| | gatattgccac-ttacttttgccaacagggtaa-t | |
| | acgcttccgtacacgttcggaggggggactaagtt | |
| | ggaaataacaggctccacctctggatccggcaagc | |
| | ccg-gatctggcgagggatccac-caagggcgagg | |
| | tgaaactgcaggagtcaggacctggcctggtggcg | |
| | ccctcacagagcctgtccgtcacatgcac-tgtct | |
| | caggggtctcattacccgac-tatggtgtaagctg | |
| | gattcgccagcctccacgaaagggtctggagtggc | |
| | tgggagtaatatggggtagtgaaac-cacatacta | |
| | -taattcagctctcaaatccagactgaccatcatc | |
| | aaggacaactccaagagccaagttttcttaaaaat | |
| | gaacagtctg-caaactgatgacacagccatttac | |
| | tactgtgccaaacattattactacggtggtagcta | |
| | tgctatggac-tactggggtcaaggaacctcagtc | |
| | ac-cgtctcctcagcggccgcaattgaagttatgt | |
| | atcctcctccttacctagacaatgagaagagcaat | |
| | ggaac-cattatccatgtgaaagggaaacaccttt | |
| | -gtccaagtcccctatttcccggaccttctaagcc | |
| | cttttgggtgctggtggtggttgggggagtcctgg | |
| | cttgctatagctt-gctagtaacag-tggccttta | |
| | ttattttctgggtgaggagtaagaggagcaggctc | |
| | ctgcacagtgac-tacatgaacatgactccccgcc | |
| | gccccgggcccacccg-caagcattac-cagccct | |
| | atgccccaccacgcgacttcgcagcctatcgctcc | |
| | agagtgaagttcagcaggagcgcagac-gcccccg | |
| | cgtaccagcagggccagaaccagctc-tataacga | |
| | gctcaatctaggacgaagagaggagtacgatgttt | |
| | tggacaagagacgtggccgggaccctga-gatggg | |
| | gggaaagccgagaaggaa-gaaccctcaggaaggc | |
| | ctgtacaatgaactgcagaaagataagatggcgga | |
| | ggcctacagtgagattgg-gatgaaaggcgagcgc | |
| | cggaggggcaagggg-cacgatggcctttaccagg | |
| | gtctcagtacagccaccaaggacacctacgac-gc | |
| | ccttcacatgcaggccctgccccctcgc | |
| 14038 | MLLLVTSLLLCELPHPAFL-LIPDIQMTQTTSSLS | Axicabtagene ci- |
| | ASLGDRVTIS-CRASQDISKY-LNWYQQKPDGTVK | loleucel CD19 |
| | LLIYHTSRLHSGVPSRFSGSGSGTDYSLTISNLEQ | CAR amino acid |
| | EDIATY-FCQQGNTLPYTFGGGTKLEIT-GSTSGS | sequence |
| | GKPGSGEGSTKGEVKLQESGPGLVAPSQSLSVTCT | |
| | VSGVSLPDY-GVSWIRQPPRKGLEWLGVIWGSET- | |
| | TYYNSALKSRLTIIK-DNSKSQVFLKMNSLQTDDT | |
| | AIYYCAKHYYYGGSYAMDYWGQGTSVTVSSAAAIE | |
| | VMYPPPYLDNEKSNGTIIHVKGKHLCPSPLF-PGP | |
| | SKPFWVLVVVGGVLACYSLLVTVAFII-FWVRSKR | |
| | SRLLHSDYMNMTPRRPGPTRKHYQPYAPPRDFAAY | |
| | RSRVKFSRSADAPA-YQQGQNQLYNELNLGR-REE | |
| | YDVLDKRRGRD-PEMGGKPRRKNPQEGLYNELQKD | |
| | KMAEAYSEIGMKGERRRGKGHDGLYQGLSTAT-KD | |
| | TYDALHMQALPPR | |

TABLE 9
Annotation of tisagenlecleucel CD19 CAR sequences

| | Nucleotide | Amino Acid |
|---|---|---|
| Feature | Sequence Position | Sequence Position |
| CD8a signal peptide | 1-63 | 1-21 |
| FMC63 scFv | 64-789 | 22-263 |
| (V_{L}-3xG₄S linker-V_{H}) | | |
| CD8α hinge domain | 790-924 | 264-308 |
| CD8α transmembrane domain | 925-996 | 309-332 |
| 4-1BB costimulatory domain | 997-1122 | 333-374 |
| CD3ζ signaling domain | 1123-1458 | 375-486 |

TABLE 10
Annotation of lisocabtagene maraleucel CD19 CAR sequences

| | Nucleotide | Amino Acid |
|---|---|---|
| Feature | Sequence Position | Sequence Position |
| GMCSFR-a signal peptide | 1-66 | 1-22 |
| FMC63 scFv | 67-801 | 23-267 |
| (V_{L}-Whitlow linker-V_{H}) | | |
| IgG4 hinge domain | 802-837 | 268-279 |
| CD28 transmembrane domain | 838-921 | 280-307 |
| 4-1BB costimulatory domain | 922-1047 | 308-349 |
| CD3ζ signaling domain | 1048-1383 | 350-461 |

TABLE 11
Annotation of axicabtagene ciloleucel CD19 CAR sequences

| | Nucleotide | Amino Acid |
|---|---|---|
| Feature | Sequence Position | Sequence Position |
| CSF2RA signal peptide | 1-66 | 1-22 |
| FMC63 scFv | 67-801 | 23-267 |
| (V_{L}-Whitlow linker-V_{H}) | | |
| CD28 hinge domain | 802-927 | 268-309 |
| CD28 transmembrane domain | 928-1008 | 310-336 |
| CD28 costimulatory domain | 1009-1131 | 337-377 |
| CD3ζ signaling domain | 1132-1467 | 378-489 |

[0347] In some embodiments, the polycistronic vector comprises an expression cassette that contains a nucleotide sequence encoding CD19 CAR as set forth in SEQ ID NO: 14033, 14035, or 14037, or at least 80% identical (e.g., at least 80%, at least 85%, at least 90%, at least 95%, at least 96%, at least 97%, at least 98%, at least 99%, or 100% identical) to the nucleotide sequence set forth in SEQ ID NO: 14033, 14035, or 14037. The encoded CD19 CAR has a corresponding amino acid sequence set forth in SEQ ID NO: 14034, 14036, or 14038, respectively, or is at least 80% identical (e.g., at least 80%, at least 85%, at least 90%, at least 95%, at least 96%, at least 97%, at least 98%, at least 99%, or 100% identical) to the amino acid sequence set forth in of SEQ ID NO: 14034, 14036, or 14038, respectively.

### CD20 CAR

[0348] In some embodiments, the CAR is a CD20 CAR (“CD20-CAR”), and in these embodiments, the polycistronic vector comprises an expression cassette that contains a nucleotide sequence encoding a CD20 CAR. CD20 is an antigen found on the surface of B cells as early at the pro-B phase and progressively at increasing levels until B cell maturity, as well as on the cells of most B-cell neoplasms. CD20 positive cells are also sometimes found in cases of Hodgkins disease, myeloma, and thymoma. In some embodiments, the CD20 CAR comprises a signal peptide, an extracellular binding domain that specifically binds CD20, a hinge domain, a transmembrane domain, an intracellular costimulatory domain, and/or an intracellular signaling domain in tandem.

[0349] In some embodiments, the signal peptide of the CD20 CAR comprises a CD4 signal peptide. In some embodiments, the CD4 signal peptide comprises or consists of an amino acid sequence set forth in SEQ ID NO:14003 or an amino acid sequence that is at least 80% identical (e.g., at least 80%, at least 85%, at least 90%, at least 95%, at least 96%, at least 97%, at least 98%, at least 99%, or 100% identical) to the amino acid sequence set forth in of SEQ ID NO:14003. In some embodiments, the signal peptide comprises an IgK signal peptide. In some embodiments, the IgK signal peptide comprises or consists of an amino acid sequence set forth in SEQ ID NO: 14004 or an amino acid sequence that is at least 80% identical (e.g., at least 80%, at least 85%, at least 90%, at least 95%, at least 96%, at least 97%, at least 98%, at least 99%, or 100% identical) to the amino acid sequence set forth in of SEQ ID NO: 14004. In some embodiments, the signal peptide comprises a GMCSFR-α or CSF2RA signal peptide. In some embodiments, the GMCSFR-α or CSF2RA signal peptide comprises or consists of an amino acid sequence set forth in SEQ ID NO: 14005 or an amino acid sequence that is at least 80% identical (e.g., at least 80%, at least 85%, at least 90%, at least 95%, at least 96%, at least 97%, at least 98%, at least 99%, or 100% identical) to the amino acid sequence set forth in of SEQ ID NO: 14005.

[0350] In some embodiments, the extracellular binding domain of the CD20 CAR is specific to CD20, for example, human CD20. The extracellular binding domain of the CD20 CAR is codon-optimized for expression in a host cell or to have variant sequences to increase functions of the extracellular binding domain. In some embodiments, the extracellular binding domain comprises an immunogenically active portion of an immunoglobulin molecule, for example, an scFv.

[0351] In some embodiments, the extracellular binding domain of the CD20 CAR is derived from an antibody specific to CD20, including, for example, Leu16, IF5, 1.5.3, rituximab, obinutuzumab, ibritumomab, ofatumumab, tositumumab, odronextamab, veltuzumab, ublituximab, and ocrelizumab. In any of these embodiments, the extracellular binding domain of the CD20 CAR comprises or consists of the V_{H}, the V_{L}, and/or one or more CDRs of any of the antibodies.

[0352] In some embodiments, the extracellular binding domain of the CD20 CAR comprises an scFv derived from the Leu16 monoclonal antibody, which comprises the heavy chain variable region (V_{H}) and the light chain variable region (V_{L}) of Leu16 connected by a linker. See Wu et al., Protein Engineering. 14(12):1025-1033 (2001). In some embodiments, the linker is a 3×G4S linker (SEQ ID NO: 9313). In other embodiments, the linker is a Whitlow linker as described herein. In some embodiments, the amino acid sequences of different portions of the entire Leu16-derived scFv (also referred to as Leu16 scFv) and its different portions are provided in Table 12 below. In some embodiments, the CD20-specific scFv comprises or consists of an amino acid sequence set forth in SEQ ID NO: 14039, 14040, or 14044, or an amino acid sequence that is at least 80% identical (e.g., at least 80%, at least 85%, at least 90%, at least 95%, at least 96%, at least 97%, at least 98%, at least 99%, or 100% identical) to the amino acid sequence set forth in of SEQ ID NO: 14039, 14040, or 14044. In some embodiments, the CD20-specific scFv comprises one or more CDRs having amino acid sequences set forth in SEQ ID NOs: 14041-14043, 14045 and 14046. In some embodiments, the CD20-specific scFv comprises a light chain with one or more CDRs having amino acid sequences set forth in SEQ ID NOs: 14041-14043. In some embodiments, the CD20-specific scFv comprises a heavy chain with one or more CDRs having amino acid sequences set forth in SEQ ID NOs: 14045-14046. In any of these embodiments, the CD20-specific scFv comprises one or more CDRs comprising one or more amino acid substitutions, or comprising a sequence that is at least 80% identical (e.g., at least 80%, at least 85%, at least 90%, at least 95%, at least 96%, at least 97%, at least 98%, at least 99%, or 100% identical), to any of the sequences identified. In some embodiments, the extracellular binding domain of the CD20 CAR comprises or consists of the one or more CDRs as described herein.

TABLE 12
Exemplary sequences of anti-CD20 scFv and components

| SEQ ID NO: | Amino Acid Sequence | Description |
|---|---|---|
| 14039 | DIVLTQSPAILSASPGEKVTMT- | Anti-CD20 Leu16 scFv |
| | CRASSSVNYMDWYQKKPGSSPKP- | entire sequence, with |
| | WIYATSNLAS- | Whitlow linker |
| | GVPARFSGSGSGTSYSLTISRVEAE | |
| | DAATYYCQQWS- | |
| | FNPPTFGGGTKLEIKGSTSGSGKP | |
| | GSGEGSTKGEVQLQQSGAELVKP- | |
| | GASVKMSCKASGYTFTSYN- | |
| | MHWVKQTPGQGLEWIGAI- | |
| | YPGNGDTSYNQKFKGKATLTADKS | |
| | SSTAYMQLSSLTSED- | |
| | SADYYCARSNYYGSSYWFFDVW- | |
| | GAGTTVTVSS | |
| 14040 | DIVLTQSPAILSASPGEKVTMT- | Anti-CD20 Leu16 scFv |
| | CRASSSVNYMDWYQKKPGSSPKP- | light chain variable |
| | WIYATSNLAS- | region |
| | GVPARFSGSGSGTSYSLTISRVEAE | |
| | DAATYYCQQWS- | |
| | FNPPTFGGGTKLEIK | |
| 14041 | RASSSVNYMD | Anti-CD20 Leu16 scFv |
| | | light chain CDR1 |
| 14042 | ATSNLAS | Anti-CD20 Leu16 scFv |
| | | light chain CDR2 |
| 14043 | QQWSFNPPT | Anti-CD20 Leu16 scFv |
| | | light chain CDR3 |
| 14044 | EVQLQQSGAELVKPGASVKMSCK- | Anti-CD20 Leu16 scFv |
| | ASGYTFTSYN- | heavy chain |
| | MHWVKQTPGQGLEWIGAIYPGNG- | |
| | DTSYNQKFKGKATLTADKSSSTAY | |
| | MQLSSLTSED- | |
| | SADYYCARSNYYGSSYWFFDVW- | |
| | GAGTTVTVSS | |
| 14045 | SYNMH | Anti-CD20 Leu16 scFv |
| | | heavy chain CDR1 |
| 14046 | AIYPGNGDTSYNQKFKG | Anti-CD20 Leu16 scFv |
| | | heavy chain CDR2 |

[0353] In some embodiments, the hinge domain of the CD20 CAR comprises a CD4 hinge domain, for example, a human CD4 hinge domain. In some embodiments, the CD4 hinge domain comprises or consists of an amino acid sequence set forth in SEQ ID NO: 14006 or an amino acid sequence that is at least 80% identical (e.g., at least 80%, at least 85%, at least 90%, at least 95%, at least 96%, at least 97%, at least 98%, at least 99%, or 100% identical) to the amino acid sequence set forth in of SEQ ID NO: 14006. In some embodiments, the hinge domain comprises a CD28 hinge domain, for example, a human CD28 hinge domain. In some embodiments, the CD28 hinge domain comprises or consists of an amino acid sequence set forth in SEQ ID NO: 14007 or an amino acid sequence that is at least 80% identical (e.g., at least 80%, at least 85%, at least 90%, at least 95%, at least 96%, at least 97%, at least 98%, at least 99%, or 100% identical) to the amino acid sequence set forth in of SEQ ID NO: 14007. In some embodiments, the hinge domain comprises an IgG4 hinge domain, for example, a human IgG4 hinge domain. In some embodiments, the IgG4 hinge domain comprises or consists of an amino acid sequence set forth in SEQ ID NO: 14008 or SEQ ID NO: 14009, or an amino acid sequence that is at least 80% identical (e.g., at least 80%, at least 85%, at least 90%, at least 95%, at least 96%, at least 97%, at least 98%, at least 99%, or 100% identical) to the amino acid sequence set forth in of SEQ ID NO: 14008 or SEQ ID NO: 14009. In some embodiments, the hinge domain comprises a IgG4 hinge-Ch2-Ch3 domain, for example, a human IgG4 hinge-Ch2-Ch3 domain. In some embodiments, the IgG4 hinge-Ch2-Ch3 domain comprises or consists of an amino acid sequence set forth in SEQ ID NO:14010 or an amino acid sequence that is at least 80% identical (e.g., at least 80%, at least 85%, at least 90%, at least 95%, at least 96%, at least 97%, at least 98%, at least 99%, or 100% identical) to the amino acid sequence set forth in of SEQ ID NO: 14010.

[0354] In some embodiments, the transmembrane domain of the CD20 CAR comprises a CD4 transmembrane domain, for example, a human CD4 transmembrane domain. In some embodiments, the CD4 transmembrane domain comprises or consists of an amino acid sequence set forth in SEQ ID NO: 14011 or an amino acid sequence that is at least 80% identical (e.g., at least 80%, at least 85%, at least 90%, at least 95%, at least 96%, at least 97%, at least 98%, at least 99%, or 100% identical) to the amino acid sequence set forth in SEQ ID NO: 14011. In some embodiments, the transmembrane domain comprises a CD28 transmembrane domain, for example, a human CD28 transmembrane domain. In some embodiments, the CD28 transmembrane domain comprises or consists of an amino acid sequence set forth in SEQ ID NO: 14012 or an amino acid sequence that is at least 80% identical (e.g., at least 80%, at least 85%, at least 90%, at least 95%, at least 96%, at least 97%, at least 98%, at least 99%, or 100% identical) to the amino acid sequence set forth in SEQ ID NO: 14012.

[0355] In some embodiments, the intracellular costimulatory domain of the CD20 CAR comprises a 4-1BB costimulatory domain, for example, a human 4-1BB costimulatory domain. In some embodiments, the 4-1BB costimulatory domain comprises or consists of an amino acid sequence set forth in SEQ ID NO: 14015 or an amino acid sequence that is at least 80% identical (e.g., at least 80%, at least 85%, at least 90%, at least 95%, at least 96%, at least 97%, at least 98%, at least 99%, or 100% identical) to the amino acid sequence set forth in SEQ ID NO: 14015. In some embodiments, the intracellular costimulatory domain comprises a CD28 costimulatory domain, for example, a human CD28 costimulatory domain. In some embodiments, the CD28 costimulatory domain comprises or consists of an amino acid sequence set forth in SEQ ID NO: 14016 or an amino acid sequence that is at least 80% identical (e.g., at least 80%, at least 85%, at least 90%, at least 95%, at least 96%, at least 97%, at least 98%, at least 99%, or 100% identical) to the amino acid sequence set forth in SEQ ID NO: 14016.

[0356] In some embodiments, the intracellular signaling domain of the CD20 CAR comprises a CD3 zeta (2) signaling domain, for example, a human CD3ζ signaling domain. In some embodiments, the CD32 signaling domain comprises or consists of an amino acid sequence set forth in SEQ ID NO: 14017 or an amino acid sequence that is at least 80% identical (e.g., at least 80%, at least 85%, at least 90%, at least 95%, at least 96%, at least 97%, at least 98%, at least 99%, or 100% identical) to the amino acid sequence set forth in SEQ ID NO: 14017.

[0357] In some embodiments, the polycistronic vector comprises an expression cassette that contains a nucleotide sequence encoding a CD20 CAR, including, for example, a CD20 CAR comprising the CD20-specific scFv having sequences set forth in SEQ ID NO: 14039, the CD4 hinge domain of SEQ ID NO: 14006, the CD4 transmembrane domain of SEQ ID NO: 14011, the 4-1BB costimulatory domain of SEQ ID NO: 14015, the CD3ζ signaling domain of SEQ ID NO: 14017, and/or variants (i.e., having a sequence that is at least 80% identical, for example, at least 80%, at least 85%, at least 90%, at least 95%, at least 96%, at least 97%, at least 98%, or at least 99 identical to the disclosed sequence) thereof.

[0358] In some embodiments, the polycistronic vector comprises an expression cassette that contains a nucleotide sequence encoding a CD20 CAR, including, for example, a CD20 CAR comprising the CD20-specific scFv having sequences set forth in SEQ ID NO: 14039, the CD28 hinge domain of SEQ ID NO: 14007, the CD4 transmembrane domain of SEQ ID NO: 14011, the 4-1BB costimulatory domain of SEQ ID NO: 14015, the CD37 signaling domain of SEQ ID NO: 14017, and/or variants (i.e., having a sequence that is at least 80% identical, for example, at least 80%, at least 85%, at least 90%, at least 95%, at least 96%, at least 97%, at least 98%, or at least 99 identical to the disclosed sequence) thereof.

[0359] In some embodiments, the polycistronic vector comprises an expression cassette that contains a nucleotide sequence encoding a CD20 CAR, including, for example, a CD20 CAR comprising the CD20-specific scFv having sequences set forth in SEQ ID NO: 14039, the IgG4 hinge domain of SEQ ID NO: 14008 or SEQ ID NO: 14009, the CD4 transmembrane domain of SEQ ID NO: 14011, the 4-1BB costimulatory domain of SEQ ID NO: 14015, the CD37 signaling domain of SEQ ID NO: 14017, and/or variants (i.e., having a sequence that is at least 80% identical, for example, at least 80%, at least 85%, at least 90%, at least 95%, at least 96%, at least 97%, at least 98%, or at least 99 identical to the disclosed sequence) thereof.

[0360] In some embodiments, the polycistronic vector comprises an expression cassette that contains a nucleotide sequence encoding a CD20 CAR, including, for example, a CD20 CAR comprising the CD20-specific scFv having sequences set forth in SEQ ID NO: 14039, the CD4 hinge domain of SEQ ID NO: 14006, the CD28 transmembrane domain of SEQ ID NO: 14012, the 4-1BB costimulatory domain of SEQ ID NO: 14015, the CD34 signaling domain of SEQ ID NO: 14017, and/or variants (i.e., having a sequence that is at least 80% identical, for example, at least 80%, at least 85%, at least 90%, at least 95%, at least 96%, at least 97%, at least 98%, or at least 99 identical to the disclosed sequence) thereof.

[0361] In some embodiments, the polycistronic vector comprises an expression cassette that contains a nucleotide sequence encoding a CD20 CAR, including, for example, a CD20 CAR comprising the CD20-specific scFv having sequences set forth in SEQ ID NO: 14039, the CD28 hinge domain of SEQ ID NO: 14007, the CD28 transmembrane domain of SEQ ID NO: 14012, the 4-1BB costimulatory domain of SEQ ID NO: 14015, the CD37 signaling domain of SEQ ID NO: 14017, and/or variants (i.e., having a sequence that is at least 80% identical, for example, at least 80%, at least 85%, at least 90%, at least 95%, at least 96%, at least 97%, at least 98%, or at least 99 identical to the disclosed sequence) thereof.

[0362] In some embodiments, the polycistronic vector comprises an expression cassette that contains a nucleotide sequence encoding a CD20 CAR, including, for example, a CD20 CAR comprising the CD20-specific scFv having sequences set forth in SEQ ID NO: 14039, the IgG4 hinge domain of SEQ ID NO: 14008 or SEQ ID NO: 14009, the CD28 transmembrane domain of SEQ ID NO: 14012, the 4-1BB costimulatory domain of SEQ ID NO: 14015, the CD34 signaling domain of SEQ ID NO: 14017, and/or variants (i.e., having a sequence that is at least 80% identical, for example, at least 80%, at least 85%, at least 90%, at least 95%, at least 96%, at least 97%, at least 98%, or at least 99 identical to the disclosed sequence) thereof.

### CD22 CAR

[0363] In some embodiments, the CAR is a CD22 CAR (“CD22-CAR”), and in these embodiments, the polycistronic vector comprises an expression cassette that contains a nucleotide sequence encoding a CD22 CAR. CD22, which is a transmembrane protein found mostly on the surface of mature B cells that functions as an inhibitory receptor for B cell receptor (BCR) signaling. CD22 is expressed in 60-70% of B cell lymphomas and leukemias (e.g., B-chronic lymphocytic leukemia, hairy cell leukemia, acute lymphocytic leukemia (ALL), and Burkitt's lymphoma) and is not present on the cell surface in early stages of B cell development or on stem cells. In some embodiments, the CD22 CAR comprises a signal peptide, an extracellular binding domain that specifically binds CD22, a hinge domain, a transmembrane domain, an intracellular costimulatory domain, and/or an intracellular signaling domain in tandem.

[0364] In some embodiments, the signal peptide of the CD22 CAR comprises a CD4 signal peptide. In some embodiments, the CD4 signal peptide comprises or consists of an amino acid sequence set forth in SEQ ID NO: 14003 or an amino acid sequence that is at least 80% identical (e.g., at least 80%, at least 85%, at least 90%, at least 95%, at least 96%, at least 97%, at least 98%, at least 99%, or 100% identical) to the amino acid sequence set forth in of SEQ ID NO: 14003. In some embodiments, the signal peptide comprises an IgK signal peptide. In some embodiments, the IgK signal peptide comprises or consists of an amino acid sequence set forth in SEQ ID NO: 14004 or an amino acid sequence that is at least 80% identical (e.g., at least 80%, at least 85%, at least 90%, at least 95%, at least 96%, at least 97%, at least 98%, at least 99%, or 100% identical) to the amino acid sequence set forth in of SEQ ID NO: 14004. In some embodiments, the signal peptide comprises a GMCSFR-α or CSF2RA signal peptide. In some embodiments, the GMCSFR-α or CSF2RA signal peptide comprises or consists of an amino acid sequence set forth in SEQ ID NO: 14005 or an amino acid sequence that is at least 80% identical (e.g., at least 80%, at least 85%, at least 90%, at least 95%, at least 96%, at least 97%, at least 98%, at least 99%, or 100% identical) to the amino acid sequence set forth in of SEQ ID NO: 14005.

[0365] In some embodiments, the extracellular binding domain of the CD22 CAR is specific to CD22, for example, human CD22. The extracellular binding domain of the CD22 CAR is codon-optimized for expression in a host cell or to have variant sequences to increase functions of the extracellular binding domain. In some embodiments, the extracellular binding domain comprises an immunogenically active portion of an immunoglobulin molecule, for example, an scFv.

[0366] In some embodiments, the extracellular binding domain of the CD22 CAR is derived from an antibody specific to CD22, including, for example, SM03, inotuzumab, epratuzumab, moxetumomab, and pinatuzumab. In any of these embodiments, the extracellular binding domain of the CD22 CAR comprises or consists of the V_{H}, the V_{L}, and/or one or more CDRs of any of the antibodies.

[0367] In some embodiments, the extracellular binding domain of the CD22 CAR comprises an scFv derived from the m971 monoclonal antibody (m971), which comprises the heavy chain variable region (V_{H}) and the light chain variable region (V_{L}) of m971 connected by a linker. In some embodiments, the linker is a 3×G4S linker (SEQ ID NO: 9313). In other embodiments, the Whitlow linker is used instead. In some embodiments, the amino acid sequences of the entire m971-derived scFv (also referred to as m971 scFv) and its different portions are provided in Table 13 below. In some embodiments, the CD22-specific scFv comprises or consists of an amino acid sequence set forth in SEQ ID NO: 14047, 14048, or 14052, or an amino acid sequence that is at least 80% identical (e.g., at least 80%, at least 85%, at least 90%, at least 95%, at least 96%, at least 97%, at least 98%, at least 99%, or 100% identical) to the amino acid sequence set forth in of SEQ ID NO: 14047, 14048, or 14052. In some embodiments, the CD22-specific scFv comprises one or more CDRs having amino acid sequences set forth in SEQ ID NOs: 14049-14051 and 14053-14055. In some embodiments, the CD22-specific scFv comprises a heavy chain with one or more CDRs having amino acid sequences set forth in SEQ ID NOs: 14049-14051. In some embodiments, the CD22-specific scFv comprises a light chain with one or more CDRs having amino acid sequences set forth in SEQ ID NOs: 14053-14055. In any of these embodiments, the CD22-specific scFv comprises one or more CDRs comprising one or more amino acid substitutions, or comprising a sequence that is at least 80% identical (e.g., at least 80%, at least 85%, at least 90%, at least 95%, at least 96%, at least 97%, at least 98%, at least 99%, or 100% identical), to any of the sequences identified. In some embodiments, the extracellular binding domain of the CD22 CAR comprises or consists of the one or more CDRs as described herein.

[0368] In some embodiments, the extracellular binding domain of the CD22 CAR comprises an scFv derived from m971-L7, which is an affinity matured variant of m971 with significantly improved CD22 binding affinity compared to the parental antibody m971 (improved from about 2 nM to less than 50 pM). In some embodiments, the scFv derived from m971-L7 comprises the V_{H} and the V_{L} of m971-L7 connected by a 3×G4S linker (SEQ ID NO: 9313). In other embodiments, the Whitlow linker is used instead. In some embodiments, the amino acid sequences of the entire m971-L7-derived scFv (also referred to as m971-L7 scFv) and its different portions are provided in Table K below. In some embodiments, the CD22-specific scFv comprises or consists of an amino acid sequence set forth in SEQ ID NO: 14056, 14057, or 14061, or an amino acid sequence that is at least 80% identical (e.g., at least 80%, at least 85%, at least 90%, at least 95%, at least 96%, at least 97%, at least 98%, at least 99%, or 100% identical) to the amino acid sequence set forth in of SEQ ID NO: 14056, 14057, or 14061. In some embodiments, the CD22-specific scFv comprises one or more CDRs having amino acid sequences set forth in SEQ ID NOs: 14058-14060 and 14062-14064. In some embodiments, the CD22-specific scFv comprises a heavy chain with one or more CDRs having amino acid sequences set forth in SEQ ID NOs: 14058-14060. In some embodiments, the CD22-specific scFv comprises a light chain with one or more CDRs having amino acid sequences set forth in SEQ ID NOs: 14062-14064. In any of these embodiments, the CD22-specific scFv comprises one or more CDRs comprising one or more amino acid substitutions, or comprising a sequence that is at least 80% identical (e.g., at least 80%, at least 85%, at least 90%, at least 95%, at least 96%, at least 97%, at least 98%, at least 99%, or 100% identical), to any of the sequences identified. In some embodiments, the extracellular binding domain of the CD22 CAR comprises or consists of the one or more CDRs as described herein.

TABLE 13
Exemplary sequences of anti-CD22 scFv and components

| SEQ ID NO: | Amino Acid Sequence | Description |
|---|---|---|
| 14047 | QVQLQQSGPGLVKP- | Anti-CD22 m971 scFv |
| | SQTLSLTCAISGDSVSS- | entire sequence, with |
| | NSAAWNWIRQSPSR- | 3xG₄S linker (SEQ ID |
| | GLEWLGRTYYRSKWYNDYAVSVK | NO: 9313) |
| | SRITINPDTSKNQFSLQLNSVTPED- | |
| | TAVYYCAREVTGDLEDAFD- | |
| | IWGQGTMVTVSSGGGGSGGGGSG | |
| | GGGSDIQMTQSPSSLSASVG- | |
| | DRVTITCRASQTI- | |
| | WSYLNWYQQRPGKAPNLLIYAAS- | |
| | SLQSGVPSRFSGRGSGTDFTLTISS | |
| | LQAEDFA- | |
| | TYYCQQSYSIPQTFGQGTKLEIK | |
| 14048 | QVQLQQSGPGLVKP- | Anti-CD22 m971 scFv |
| | SQTLSLTCAISGDSVSS- | heavy chain variable |
| | NSAAWNWIRQSPSR- | region |
| | GLEWLGRTYYRSKWYNDYAVSVK | |
| | SRITINPDTSKNQFSLQLNSVTPED- | |
| | TAVYYCAREVTGDLEDAFD- | |
| | IWGQGTMVTVSS | |
| 14049 | GDSVSSNSAA | Anti-CD22 m971 scFv |
| | | heavy chain CDR1 |
| 14050 | TYYRSKWYN | Anti-CD22 m971 scFv |
| | | heavy chain CDR2 |
| 14051 | AREVTGDLEDAFDI | Anti-CD22 m971 scFv |
| | | heavy chain CDR3 |
| 14052 | DIQMTQSPSSLSASVG- | Anti-CD22 m971 scFv |
| | DRVTITCRASQTI- | light chain |
| | WSYLNWYQQRPGKAPNLLIYAAS- | |
| | SLQSGVPSRFSGRGSGTDFTLTISS | |
| | LQAEDFA- | |
| | TYYCQQSYSIPQTFGQGTKLEIK | |
| 14053 | QTIWSY | Anti-CD22 m971 scFv |
| | | light chain CDR1 |
| | AAS | Anti-CD22 m971 scFv |
| | | light chain CDR2 |
| 14055 | QQSYSIPQT | Anti-CD22 m971 scFv |
| | | light chain CDR3 |
| 14056 | QVQLQQSGPGMVKP- | Anti-CD22 m971-L7 |
| | SQTLSLTCAISGDSVSS- | scFv entire sequence, |
| | NSVAWNWIRQSPSR- | with 3xG₄S linker |
| | GLEWLGRTYYRST- | (SEQ ID NO: 9313) |
| | WYNDYAVSMKSRITINPDTNKNQFS | |
| | LQLNSVTPEDTAVYYCAREV- | |
| | TGDLEDAFD- | |
| | IWGQGTMVTVSSGGGGSGGGGSG | |
| | GGGSDIQMIQSPSSLSASVG- | |
| | DRVTITCRASQTI- | |
| | WSYLNWYRQRPGEAPNLLIYAAS- | |
| | SLQSGVPSRFSGRGSGTDFTLTISS | |
| | LQAEDFA- | |
| | TYYCQQSYSIPQTFGQGTKLEIK | |
| 14057 | QVQLQQSGPGMVKP- | Anti-CD22 m971-L7 |
| | SQTLSLTCAISGDSVSS- | scFv heavy chain vari- |
| | NSVAWNWIRQSPSR- | able region |
| | GLEWLGRTYYRST- | |
| | WYNDYAVSMKSRITINPDTNKNQFS | |
| | LQLNSVTPEDTAVYYCAREV- | |
| | TGDLEDAFDIWGQGTMVTVSS | |
| 14058 | GDSVSSNSVA | Anti-CD22 m971-L7 |
| | | scFv heavy chain |
| | | CDR1 |
| 14059 | TYYRSTWYN | Anti-CD22 m971-L7 |
| | | scFv heavy chain |
| | | CDR2 |
| 14060 | AREVTGDLEDAFDI | Anti-CD22 m971-L7 |
| | | scFv heavy chain |
| | | CDR3 |
| 14061 | DIQMIQSPSSLSASVG- | Anti-CD22 m971-L7 |
| | DRVTITCRASQTI- | scFv light chain varia- |
| | WSYLNWYRQRPGEAPNLLIYAAS- | ble region |
| | SLQSGVPSRFSGRGSGTDFTLTISS | |
| | LQAEDFA- | |
| | TYYCQQSYSIPQTFGQGTKLEIK | |
| 14062 | QTIWSY | Anti-CD22 m971-L7 |
| | | scFv light chain CDR1 |
| | AAS | Anti-CD22 m971-L7 |
| | | scFv light chain CDR2 |
| 14064 | QQSYSIPQT | Anti-CD22 m971-L7 |
| | | scFv light chain CDR3 |

[0369] In some embodiments, the extracellular binding domain of the CD22 CAR comprises immunotoxins HA22 or BL22. Immunotoxins BL22 and HA22 are therapeutic agents that comprise an scFv specific for CD22 fused to a bacterial toxin, and thus can bind to the surface of the cancer cells that express CD22 and kill the cancer cells. BL22 comprises a dsFv of an anti-CD22 antibody, RFB4, fused to a 38-kDa truncated form of Pseudomonas exotoxin A (Bang et al., Clin. Cancer Res., 11:1545-50 (2005)). HA22 (CAT8015, moxetumomab pasudotox) is a mutated, higher affinity version of BL22 (Ho et al., J. Biol. Chem., 280(1): 607-17 (2005)). Suitable sequences of antigen binding domains of HA22 and BL22 specific to CD22 are disclosed in, for example, U.S. Pat. Nos. 7,541,034; 7,355,012; and 7,982,011.

[0370] In some embodiments, the hinge domain of the CD22 CAR comprises a CD4 hinge domain, for example, a human CD4 hinge domain. In some embodiments, the CD4 hinge domain comprises or consists of an amino acid sequence set forth in SEQ ID NO: 14006 or an amino acid sequence that is at least 80% identical (e.g., at least 80%, at least 85%, at least 90%, at least 95%, at least 96%, at least 97%, at least 98%, at least 99%, or 100% identical) to the amino acid sequence set forth in of SEQ ID NO: 14006. In some embodiments, the hinge domain comprises a CD28 hinge domain, for example, a human CD28 hinge domain. In some embodiments, the CD28 hinge domain comprises or consists of an amino acid sequence set forth in SEQ ID NO: 14007 or an amino acid sequence that is at least 80% identical (e.g., at least 80%, at least 85%, at least 90%, at least 95%, at least 96%, at least 97%, at least 98%, at least 99%, or 100% identical) to the amino acid sequence set forth in of SEQ ID NO: 14007. In some embodiments, the hinge domain comprises an IgG4 hinge domain, for example, a human IgG4 hinge domain. In some embodiments, the IgG4 hinge domain comprises or consists of an amino acid sequence set forth in SEQ ID NO: 14008 or SEQ ID NO: 14009, or an amino acid sequence that is at least 80% identical (e.g., at least 80%, at least 85%, at least 90%, at least 95%, at least 96%, at least 97%, at least 98%, at least 99%, or 100% identical) to the amino acid sequence set forth in of SEQ ID NO: 14008 or SEQ ID NO: 14009. In some embodiments, the hinge domain comprises a IgG4 hinge-Ch2-Ch3 domain, for example, a human IgG4 hinge-Ch2-Ch3 domain. In some embodiments, the IgG4 hinge-Ch2-Ch3 domain comprises or consists of an amino acid sequence set forth in SEQ ID NO: 14010 or an amino acid sequence that is at least 80% identical (e.g., at least 80%, at least 85%, at least 90%, at least 95%, at least 96%, at least 97%, at least 98%, at least 99%, or 100% identical) to the amino acid sequence set forth in of SEQ ID NO: 14010.

[0371] In some embodiments, the transmembrane domain of the CD22 CAR comprises a CD4 transmembrane domain, for example, a human CD4 transmembrane domain. In some embodiments, the CD4 transmembrane domain comprises or consists of an amino acid sequence set forth in SEQ ID NO: 14011 or an amino acid sequence that is at least 80% identical (e.g., at least 80%, at least 85%, at least 90%, at least 95%, at least 96%, at least 97%, at least 98%, at least 99%, or 100% identical) to the amino acid sequence set forth in SEQ ID NO: 14011. In some embodiments, the transmembrane domain comprises a CD28 transmembrane domain, for example, a human CD28 transmembrane domain. In some embodiments, the CD28 transmembrane domain comprises or consists of an amino acid sequence set forth in SEQ ID NO:14012 or an amino acid sequence that is at least 80% identical (e.g., at least 80%, at least 85%, at least 90%, at least 95%, at least 96%, at least 97%, at least 98%, at least 99%, or 100% identical) to the amino acid sequence set forth in SEQ ID NO: 14012.

[0372] In some embodiments, the intracellular costimulatory domain of the CD22 CAR comprises a 4-1BB costimulatory domain, for example, a human 4-1BB costimulatory domain. In some embodiments, the 4-1BB costimulatory domain comprises or consists of an amino acid sequence set forth in SEQ ID NO: 14015 or an amino acid sequence that is at least 80% identical (e.g., at least 80%, at least 85%, at least 90%, at least 95%, at least 96%, at least 97%, at least 98%, at least 99%, or 100% identical) to the amino acid sequence set forth in SEQ ID NO: 14015. In some embodiments, the intracellular costimulatory domain comprises a CD28 costimulatory domain, for example, a human CD28 costimulatory domain. In some embodiments, the CD28 costimulatory domain comprises or consists of an amino acid sequence set forth in SEQ ID NO: 14016 or an amino acid sequence that is at least 80% identical (e.g., at least 80%, at least 85%, at least 90%, at least 95%, at least 96%, at least 97%, at least 98%, at least 99%, or 100% identical) to the amino acid sequence set forth in SEQ ID NO: 14016.

[0373] In some embodiments, the intracellular signaling domain of the CD22 CAR comprises a CD3 zeta (2) signaling domain, for example, a human CD37 signaling domain. In some embodiments, the CD34 signaling domain comprises or consists of an amino acid sequence set forth in SEQ ID NO: 14017 or an amino acid sequence that is at least 80% identical (e.g., at least 80%, at least 85%, at least 90%, at least 95%, at least 96%, at least 97%, at least 98%, at least 99%, or 100% identical) to the amino acid sequence set forth in SEQ ID NO: 14017.

[0374] In some embodiments, the polycistronic vector comprises an expression cassette that contains a nucleotide sequence encoding a CD22 CAR, including, for example, a CD22 CAR comprising the CD22-specific scFv having sequences set forth in SEQ ID NO: 14047 or SEQ ID NO: 14056, the CD4 hinge domain of SEQ ID NO:9, the CD4 transmembrane domain of SEQ ID NO: 14011, the 4-1BB costimulatory domain of SEQ ID NO: 14015, the CD37 signaling domain of SEQ ID NO: 14017, and/or variants (i.e., having a sequence that is at least 80% identical, for example, at least 80%, at least 85%, at least 90%, at least 95%, at least 96%, at least 97%, at least 98%, or at least 99 identical to the disclosed sequence) thereof.

[0375] In some embodiments, the polycistronic vector comprises an expression cassette that contains a nucleotide sequence encoding a CD22 CAR, including, for example, a CD22 CAR comprising the CD22-specific scFv having sequences set forth in SEQ ID NO: 14047 or SEQ ID NO: 14056, the CD28 hinge domain of SEQ ID NO: 14007, the CD4 transmembrane domain of SEQ ID NO: 14011, the 4-1BB costimulatory domain of SEQ ID NO: 14015, the CD37 signaling domain of SEQ ID NO: 14017, and/or variants (i.e., having a sequence that is at least 80% identical, for example, at least 80%, at least 85%, at least 90%, at least 95%, at least 96%, at least 97%, at least 98%, or at least 99 identical to the disclosed sequence) thereof.

[0376] In some embodiments, the polycistronic vector comprises an expression cassette that contains a nucleotide sequence encoding a CD22 CAR, including, for example, a CD22 CAR comprising the CD22-specific scFv having sequences set forth in SEQ ID NO: 14047 or SEQ ID NO: 14056, the IgG4 hinge domain of SEQ ID NO: 14008 or SEQ ID NO: 14009, the CD4 transmembrane domain of SEQ ID NO: 14011, the 4-1BB costimulatory domain of SEQ ID NO: 14015, the CD33 signaling domain of SEQ ID NO: 14017, and/or variants (i.e., having a sequence that is at least 80% identical, for example, at least 80%, at least 85%, at least 90%, at least 95%, at least 96%, at least 97%, at least 98%, or at least 99 identical to the disclosed sequence) thereof.

[0377] In some embodiments, the polycistronic vector comprises an expression cassette that contains a nucleotide sequence encoding a CD22 CAR, including, for example, a CD22 CAR comprising the CD22-specific scFv having sequences set forth in SEQ ID NO: 14047 or SEQ ID NO: 14056, the CD4 hinge domain of SEQ ID NO:9, the CD28 transmembrane domain of SEQ ID NO: 14012, the 4-1BB costimulatory domain of SEQ ID NO: 14015, the CD37 signaling domain of SEQ ID NO: 14017, and/or variants (i.e., having a sequence that is at least 80% identical, for example, at least 80%, at least 85%, at least 90%, at least 95%, at least 96%, at least 97%, at least 98%, or at least 99 identical to the disclosed sequence) thereof.

[0378] In some embodiments, the polycistronic vector comprises an expression cassette that contains a nucleotide sequence encoding a CD22 CAR, including, for example, a CD22 CAR comprising the CD22-specific scFv having sequences set forth in SEQ ID NO: 14047 or SEQ ID NO: 14056, the CD28 hinge domain of SEQ ID NO: 14007, the CD28 transmembrane domain of SEQ ID NO: 14012, the 4-1BB costimulatory domain of SEQ ID NO: 14015, the CD37 signaling domain of SEQ ID NO: 14017, and/or variants (i.e., having a sequence that is at least 80% identical, for example, at least 80%, at least 85%, at least 90%, at least 95%, at least 96%, at least 97%, at least 98%, or at least 99 identical to the disclosed sequence) thereof.

[0379] In some embodiments, the polycistronic vector comprises an expression cassette that contains a nucleotide sequence encoding a CD22 CAR, including, for example, a CD22 CAR comprising the CD22-specific scFv having sequences set forth in SEQ ID NO: 14047 or SEQ ID NO: 14056, the IgG4 hinge domain of SEQ ID NO: 14008 or SEQ ID NO: 14009, the CD28 transmembrane domain of SEQ ID NO: 14012, the 4-1BB costimulatory domain of SEQ ID NO: 14015, the CD34 signaling domain of SEQ ID NO: 14017, and/or variants (i.e., having a sequence that is at least 80% identical, for example, at least 80%, at least 85%, at least 90%, at least 95%, at least 96%, at least 97%, at least 98%, or at least 99 identical to the disclosed sequence) thereof.

### BCMA CAR

[0380] In some embodiments, the CAR is a BCMA CAR (“BCMA-CAR”), and in these embodiments, the polycistronic vector comprises an expression cassette that contains a nucleotide sequence encoding a BCMA CAR. BCMA is a tumor necrosis family receptor (TNFR) member expressed on cells of the B cell lineage, with the highest expression on terminally differentiated B cells or mature B lymphocytes. BCMA is involved in mediating the survival of plasma cells for maintaining long-term humoral immunity. The expression of BCMA has been recently linked to a number of cancers, such as multiple myeloma, Hodgkin's and non-Hodgkin's lymphoma, various leukemias, and glioblastoma. In some embodiments, the BCMA CAR comprises a signal peptide, an extracellular binding domain that specifically binds BCMA, a hinge domain, a transmembrane domain, an intracellular costimulatory domain, and/or an intracellular signaling domain in tandem.

[0381] In some embodiments, the signal peptide of the BCMA CAR comprises a CD4 signal peptide. In some embodiments, the CD4 signal peptide comprises or consists of an amino acid sequence set forth in SEQ ID NO: 14003 or an amino acid sequence that is at least 80% identical (e.g., at least 80%, at least 85%, at least 90%, at least 95%, at least 96%, at least 97%, at least 98%, at least 99%, or 100% identical) to the amino acid sequence set forth in of SEQ ID NO: 14003. In some embodiments, the signal peptide comprises an IgK signal peptide. In some embodiments, the IgK signal peptide comprises or consists of an amino acid sequence set forth in SEQ ID NO: 14004 or an amino acid sequence that is at least 80% identical (e.g., at least 80%, at least 85%, at least 90%, at least 95%, at least 96%, at least 97%, at least 98%, at least 99%, or 100% identical) to the amino acid sequence set forth in of SEQ ID NO: 14004. In some embodiments, the signal peptide comprises a GMCSFR-α or CSF2RA signal peptide. In some embodiments, the GMCSFR-α or CSF2RA signal peptide comprises or consists of an amino acid sequence set forth in SEQ ID NO: 14005 or an amino acid sequence that is at least 80% identical (e.g., at least 80%, at least 85%, at least 90%, at least 95%, at least 96%, at least 97%, at least 98%, at least 99%, or 100% identical) to the amino acid sequence set forth in of SEQ ID NO: 14005.

[0382] In some embodiments, the extracellular binding domain of the BCMA CAR is specific to BCMA, for example, human BCMA. The extracellular binding domain of the BCMA CAR can be codon-optimized for expression in a host cell or to have variant sequences to increase functions of the extracellular binding domain.

[0383] In some embodiments, the extracellular binding domain comprises an immunogenically active portion of an immunoglobulin molecule, for example, an scFv. In some embodiments, the extracellular binding domain of the BCMA CAR is derived from an antibody specific to BCMA, including, for example, belantamab, erlanatamab, teclistamab, LCAR-B38M, and ciltacabtagene. In any of these embodiments, the extracellular binding domain of the BCMA CAR comprises or consists of the V_{H}, the V_{L}, and/or one or more CDRs of any of the antibodies.

[0384] In some embodiments, the extracellular binding domain of the BCMA CAR comprises an scFv derived from C11D5.3, a murine monoclonal antibody as described in Carpenter et al., Clin. Cancer Res. 19(8):2048-2060 (2013). See also PCT Application Publication No. WO2010/104949. The C11D5.3-derived scFv may comprise the heavy chain variable region (V_{H}) and the light chain variable region (V_{L}) of C11D5.3 connected by the Whitlow linker, the amino acid sequences of which is provided in Table 14 below. In some embodiments, the BCMA-specific extracellular binding domain comprises or consists of an amino acid sequence set forth in SEQ ID NO: 14065, 14066, or 14067, or an amino acid sequence that is at least 80% identical (e.g., at least 80%, at least 85%, at least 90%, at least 95%, at least 96%, at least 97%, at least 98%, at least 99%, or 100% identical) to the amino acid sequence set forth in of SEQ ID NO: 14065, 14066, or 14067. In some embodiments, the BCMA-specific extracellular binding domain comprises one or more CDRs having amino acid sequences set forth in SEQ ID NOs: 14067-14069 and 14071-14073. In some embodiments, the BCMA-specific extracellular binding domain comprises a light chain with one or more CDRs having amino acid sequences set forth in SEQ ID NOs: 14067-14069. In some embodiments, the BCMA-specific extracellular binding domain comprises a heavy chain with one or more CDRs having amino acid sequences set forth in SEQ ID NOs: 14071-14073. In any of these embodiments, the BCMA-specific scFv comprises one or more CDRs comprising one or more amino acid substitutions, or comprising a sequence that is at least 80% identical (e.g., at least 80%, at least 85%, at least 90%, at least 95%, at least 96%, at least 97%, at least 98%, at least 99%, or 100% identical), to any of the sequences identified. In some embodiments, the extracellular binding domain of the BCMA CAR comprises or consists of the one or more CDRs as described herein.

[0385] In some embodiments, the extracellular binding domain of the BCMA CAR comprises an scFv derived from another murine monoclonal antibody, C12A3.2, as described in Carpenter et al., Clin. Cancer Res. 19(8):2048-2060 (2013) and PCT Application Publication No. WO2010/104949, the amino acid sequence of which is also provided in Table 14 below. In some embodiments, the BCMA-specific extracellular binding domain comprises or consists of an amino acid sequence set forth in SEQ ID NO: 14074, 14075, or 14079, or an amino acid sequence that is at least 80% identical (e.g., at least 80%, at least 85%, at least 90%, at least 95%, at least 96%, at least 97%, at least 98%, at least 99%, or 100% identical) to the amino acid sequence set forth in of SEQ ID NO: 14074, 14075, or 14079. In some embodiments, the BCMA-specific extracellular binding domain comprises one or more CDRs having amino acid sequences set forth in SEQ ID NOs: 14076-14078 and 14080-14082. In some embodiments, the BCMA-specific extracellular binding domain comprises a light chain with one or more CDRs having amino acid sequences set forth in SEQ ID NOs: 14076-14078. In some embodiments, the BCMA-specific extracellular binding domain comprises a heavy chain with one or more CDRs having amino acid sequences set forth in SEQ ID NOs: 14080-14082. In any of these embodiments, the BCMA-specific scFv comprises one or more CDRs comprising one or more amino acid substitutions, or comprising a sequence that is at least 80% identical (e.g., at least 80%, at least 85%, at least 90%, at least 95%, at least 96%, at least 97%, at least 98%, at least 99%, or 100% identical), to any of the sequences identified. In some embodiments, the extracellular binding domain of the BCMA CAR comprises or consists of the one or more CDRs as described herein.

[0386] In some embodiments, the extracellular binding domain of the BCMA CAR comprises a murine monoclonal antibody with high specificity to human BCMA, referred to as BB2121 in Friedman et al., Hum. Gene Ther. 29(5):585-601 (2018)). See also, PCT Application Publication No. WO2012163805.

[0387] In some embodiments, the extracellular binding domain of the BCMA CAR comprises single variable fragments of two heavy chains (VHH) that bind to two epitopes of BCMA as described in Zhao et al., J. Hematol. Oncol. 11(1):141 (2018), also referred to as LCAR-B38M. See also, PCT Application Publication No. WO2018/028647.

[0388] In some embodiments, the extracellular binding domain of the BCMA CAR comprises a fully human heavy-chain variable domain (FHVH) as described in Lam et al., Nat. Commun. 11(1):283 (2020), also referred to as FHVH33. See also, PCT Application Publication No. WO2019/006072. The amino acid sequences of FHVH33 and its CDRs are provided in Table 14 below. In some embodiments, the BCMA-specific extracellular binding domain comprises or consists of an amino acid sequence set forth in SEQ ID NO: 14083 or an amino acid sequence that is at least 80% identical (e.g., at least 80%, at least 85%, at least 90%, at least 95%, at least 96%, at least 97%, at least 98%, at least 99%, or 100% identical) to the amino acid sequence set forth in of SEQ ID NO: 14083. In some embodiments, the BCMA-specific extracellular binding domain comprises one or more CDRs having amino acid sequences set forth in SEQ ID NOs: 14084-14086. In any of these embodiments, the BCMA-specific extracellular binding domain comprises one or more CDRs comprising one or more amino acid substitutions, or comprising a sequence that is at least 80% identical (e.g., at least 80%, at least 85%, at least 90%, at least 95%, at least 96%, at least 97%, at least 98%, at least 99%, or 100% identical), to any of the sequences identified. In some embodiments, the extracellular binding domain of the BCMA CAR comprises or consists of the one or more CDRs as described herein.

[0389] In some embodiments, the extracellular binding domain of the BCMA CAR comprises an scFv derived from CT103A (or CAR0085) as described in U.S. Pat. No. 11,026,975 B2, the amino acid sequence of which is provided in Table 14 below. In some embodiments, the BCMA-specific extracellular binding domain comprises or consists of an amino acid sequence set forth in SEQ ID NO: 14087, 14088, or 14092, or an amino acid sequence that is at least 80% identical (e.g., at least 80%, at least 85%, at least 90%, at least 95%, at least 96%, at least 97%, at least 98%, at least 99%, or 100% identical) to the amino acid sequence set forth in of SEQ ID NO: 14087, 14088, or 14092. In some embodiments, the BCMA-specific extracellular binding domain comprises one or more CDRs having amino acid sequences set forth in SEQ ID NOs: 14089-14091 and 14093-14095. In some embodiments, the BCMA-specific extracellular binding domain comprises a light chain with one or more CDRs having amino acid sequences set forth in SEQ ID NOs: 14089-14091. In some embodiments, the BCMA-specific extracellular binding domain comprises a heavy chain with one or more CDRs having amino acid sequences set forth in SEQ ID NOs: 14093-14095. In any of these embodiments, the BCMA-specific scFv comprises one or more CDRs comprising one or more amino acid substitutions, or comprising a sequence that is at least 80% identical (e.g., at least 80%, at least 85%, at least 90%, at least 95%, at least 96%, at least 97%, at least 98%, at least 99%, or 100% identical), to any of the sequences identified. In some embodiments, the extracellular binding domain of the BCMA CAR comprises or consists of the one or more CDRs as described herein.

[0390] Additionally, CARs and binders directed to BCMA have been described in U.S. Application Publication Nos. 2020/0246381 A1 and 2020/0339699 A1.

TABLE 14
Exemplary sequences of anti-BCMA binder and components

| SEQ ID NO: | Amino Acid Sequence | Description |
|---|---|---|
| 14065 | DIVLTQSPASLAMSLGKRATIS- | Anti-BCMA C11D5.3 |
| | CRASESVSVIGAHLIHWYQQKPGQ | scFv entire sequence, |
| | PPKLLIYLASN- | with Whitlow linker |
| | LETGVPARFSGSGSGTDFT- | |
| | LTIDPVEEDDVAIYSCLQSRIFPRT- | |
| | FGGGTKLEIKGSTSGSGKPGSGEG | |
| | STKGQIQLVQSGPELKKPGETVKIS | |
| | CKASGYTFTDYSINWVKRAPGKGL | |
| | KWMGWIN- | |
| | TETREPAYAYDFRGRFAFSLETSAS | |
| | TAYLQINNLKYEDTATYFCAL- | |
| | DYSYAMDYWGQGTSVTVSS | |
| 14066 | DIVLTQSPASLAMSLGKRATIS- | Anti-BCMA C11D5.3 |
| | CRASESVSVIGAHLIHWYQQKPGQ | scFv light chain |
| | PPKLLIYLASN- | variable region |
| | LETGVPARFSGSGSGTDFT- | |
| | LTIDPVEEDDVAIYSCLQSRIFPRT- | |
| | FGGGTKLEIK | |
| 14067 | RASESVSVIGAHLIH | Anti-BCMA C11D5.3 |
| | | scFv light chain CDR1 |
| 14068 | LASNLET | Anti-BCMA C11D5.3 |
| | | scFv light chain CDR2 |
| 14069 | LQSRIFPRT | Anti-BCMA C11D5.3 |
| | | scFv light chain CDR3 |
| 14070 | QIQLVQSGPELKKPGETVKISCK- | Anti-BCMA C11D5.3 |
| | ASGYTFTDYSINWVKRAPGKGLK- | scFv heavy chain vari- |
| | WMGWIN- | able region |
| | TETREPAYAYDFRGRFAFSLETSAS | |
| | TAYLQINNLKYEDTATYFCAL- | |
| | DYSYAMDYWGQGTSVTVSS | |
| 14071 | DYSIN | Anti-BCMA C11D5.3 |
| | | scFv heavy chain |
| | | CDR1 |
| 14072 | WINTETREPAYAYDFRG | Anti-BCMA C11D5.3 |
| | | scFv heavy chain |
| | | CDR2 |
| 14073 | DYSYAMDY | Anti-BCMA C11D5.3 |
| | | scFv heavy chain |
| | | CDR3 |
| 14074 | DIVLTQSPPSLAMSLGKRATIS- | Anti-BCMA C12A3.2 |
| | CRASESVTILGSHLI- | scFv entire sequence, |
| | YWYQQKPGQPPTLLIQ- | with Whitlow linker |
| | LASNVQTGVPARFSGSGSRTDFTL | |
| | TIDPVEEDDVAVYYCLQSRTIPRT- | |
| | FGGGTKLEIKGSTSGSGKPGSGEG | |
| | STKGQIQLVQSGPELKKPGETVKIS | |
| | CKASGYTFRHYSMNWVKQAPGKG | |
| | LKWMGRINTESGVPIYADD- | |
| | FKGRFAFSVETSASTAYL- | |
| | VINNLKDEDTASYFCSNDYLYSLD- | |
| | FWGQGTALTVSS | |
| 14075 | DIVLTQSPPSLAMSLGKRATIS- | Anti-BCMA C12A3.2 |
| | CRASESVTILGSHLI- | scFv light chain |
| | YWYQQKPGQPPTLLIQ- | variable region |
| | LASNVQTGVPARFSGSGSRTDFTL | |
| | TIDPVEEDDVAVYYCLQSRTIPRT- | |
| | FGGGTKLEIK | |
| 14076 | RASESVTILGSHLIY | Anti-BCMA C12A3.2 |
| | | scFv light chain CDR1 |
| 14077 | LASNVQT | Anti-BCMA C12A3.2 |
| | | scFv light chain CDR2 |
| 14078 | LQSRTIPRT | Anti-BCMA C12A3.2 |
| | | scFv light chain CDR3 |
| 14079 | QIQLVQSGPELKKPGETVKISCK- | Anti-BCMA C12A3.2 |
| | ASGYTFRHYSMNWVKQAPGKGLK- | scFv heavy chain |
| | WMGRINTESGVPIYADDFKGRFAF | variable region |
| | SVETSASTAYL- | |
| | VINNLKDEDTASYFCSNDYLYSLD- | |
| | FWGQGTALTVSS | |
| 14080 | HYSMN | Anti-BCMA C12A3.2 |
| | | scFv heavy chain |
| | | CDR1 |
| 14081 | RINTESGVPIYADDFKG | Anti-BCMA C12A3.2 |
| | | scFv heavy chain |
| | | CDR2 |
| 14082 | DYLYSLDF | Anti-BCMA C12A3.2 |
| | | scFv heavy chain |
| | | CDR3 |
| 14083 | EVQLLESGGGLVQPGGSLRLS- | Anti-BCMA FHVH33 |
| | CAASGFTFSSYAMSWVR- | entire sequence |
| | QAPGKGLEWVSSISGSGDYIY- | |
| | YADSVKGRFTISRDISKNTLYLQMN | |
| | SLRAEDTAVYYCAKEGTGANSSLA | |
| | DYRGQGTLVTVSS | |
| 14084 | GFTFSSYA | Anti-BCMA FHVH33 |
| | | CDR1 |
| 14085 | ISGSGDYI | Anti-BCMA FHVH33 |
| | | CDR2 |
| 14086 | AKEGTGANSSLADY | Anti-BCMA FHVH33 |
| | | CDR3 |
| 14087 | DIQMTQSPSSLSASVG- | Anti-BCMA CT103A |
| | DRVTITCRASQSIS- | scFv entire sequence, |
| | SYLNWYQQKPGKAPKLLIYAAS- | with Whitlow linker |
| | SLQSGVPSRFSGSGSGTDFTLTISS | |
| | LQPEDFA- | |
| | TYYCQQKYDLLTFGGGTKVEIKGST | |
| | SGSGKPGSGEGSTKGQLQLQESG | |
| | PGLVKPSETLSLTCTVSGGSIS- | |
| | SSSYYWGWIRQPPGKGLEWIG- | |
| | SISYSGSTYYNPSLKSRVTISVDTSK | |
| | NQFSLKLSSVTAADTAVYYCARDR | |
| | GDTILDVWGQGTMVTVSS | |
| 14088 | DIQMTQSPSSLSASVG- | Anti-BCMA CT103A |
| | DRVTITCRASQSIS- | scFv light chain |
| | SYLNWYQQKPGKAPKLLIYAAS- | variable region |
| | SLQSGVPSRFSGSGSGTDFTLTISS | |
| | LQPEDFA- | |
| | TYYCQQKYDLLTFGGGTKVEIK | |
| 14089 | QSISSY | Anti-BCMA CT103A |
| | | scFv light chain CDR1 |
| | AAS | Anti-BCMA CT103A |
| | | scFv light chain CDR2 |
| 14091 | QQKYDLLT | Anti-BCMA CT103A |
| | | scFv light chain CDR3 |
| 14092 | QLQLQESGPGLVKP- | Anti-BCMA CT103A |
| | SETLSLTCTVSGGSIS- | scFv heavy chain |
| | SSSYYWGWIRQPPGKGLEWIG- | variable region |
| | SISYSGSTYYNPSLKSRVTISVDTSK | |
| | NQFSLKLSSVTAADTAVYYCARDR | |
| | GDTILDVWGQGTMVTVSS | |
| 14093 | GGSISSSSYY | Anti-BCMA CT103A |
| | | scFv heavy chain |
| | | CDR1 |
| 14094 | ISYSGST | Anti-BCMA CT103A |
| | | scFv heavy chain |
| | | CDR2 |
| 14095 | ARDRGDTILDV | Anti-BCMA CT103A |
| | | scFv heavy chain |
| | | CDR3 |

[0391] In some embodiments, the hinge domain of the BCMA CAR comprises a CD4 hinge domain, for example, a human CD4 hinge domain. In some embodiments, the CD4 hinge domain comprises or consists of an amino acid sequence set forth in SEQ ID NO: 14006 or an amino acid sequence that is at least 80% identical (e.g., at least 80%, at least 85%, at least 90%, at least 95%, at least 96%, at least 97%, at least 98%, at least 99%, or 100% identical) to the amino acid sequence set forth in of SEQ ID NO: 14006. In some embodiments, the hinge domain comprises a CD28 hinge domain, for example, a human CD28 hinge domain. In some embodiments, the CD28 hinge domain comprises or consists of an amino acid sequence set forth in SEQ ID NO: 14007 or an amino acid sequence that is at least 80% identical (e.g., at least 80%, at least 85%, at least 90%, at least 95%, at least 96%, at least 97%, at least 98%, at least 99%, or 100% identical) to the amino acid sequence set forth in of SEQ ID NO: 14007. In some embodiments, the hinge domain comprises an IgG4 hinge domain, for example, a human IgG4 hinge domain. In some embodiments, the IgG4 hinge domain comprises or consists of an amino acid sequence set forth in SEQ ID NO: 14008 or SEQ ID NO: 14009, or an amino acid sequence that is at least 80% identical (e.g., at least 80%, at least 85%, at least 90%, at least 95%, at least 96%, at least 97%, at least 98%, at least 99%, or 100% identical) to the amino acid sequence set forth in of SEQ ID NO: 14008 or SEQ ID NO: 14009. In some embodiments, the hinge domain comprises a IgG4 hinge-Ch2-Ch3 domain, for example, a human IgG4 hinge-Ch2-Ch3 domain. In some embodiments, the IgG4 hinge-Ch2-Ch3 domain comprises or consists of an amino acid sequence set forth in SEQ ID NO: 14010 or an amino acid sequence that is at least 80% identical (e.g., at least 80%, at least 85%, at least 90%, at least 95%, at least 96%, at least 97%, at least 98%, at least 99%, or 100% identical) to the amino acid sequence set forth in of SEQ ID NO: 14010.

[0392] In some embodiments, the transmembrane domain of the BCMA CAR comprises a CD4 transmembrane domain, for example, a human CD4 transmembrane domain. In some embodiments, the CD4 transmembrane domain comprises or consists of an amino acid sequence set forth in SEQ ID NO: 14011 or an amino acid sequence that is at least 80% identical (e.g., at least 80%, at least 85%, at least 90%, at least 95%, at least 96%, at least 97%, at least 98%, at least 99%, or 100% identical) to the amino acid sequence set forth in SEQ ID NO: 14011. In some embodiments, the transmembrane domain comprises a CD28 transmembrane domain, for example, a human CD28 transmembrane domain. In some embodiments, the CD28 transmembrane domain comprises or consists of an amino acid sequence set forth in SEQ ID NO: 14012 or an amino acid sequence that is at least 80% identical (e.g., at least 80%, at least 85%, at least 90%, at least 95%, at least 96%, at least 97%, at least 98%, at least 99%, or 100% identical) to the amino acid sequence set forth in SEQ ID NO: 14012.

[0393] In some embodiments, the intracellular costimulatory domain of the BCMA CAR comprises a 4-1BB costimulatory domain, for example, a human 4-1BB costimulatory domain. In some embodiments, the 4-1BB costimulatory domain comprises or consists of an amino acid sequence set forth in SEQ ID NO: 14015 or an amino acid sequence that is at least 80% identical (e.g., at least 80%, at least 85%, at least 90%, at least 95%, at least 96%, at least 97%, at least 98%, at least 99%, or 100% identical) to the amino acid sequence set forth in SEQ ID NO: 14015. In some embodiments, the intracellular costimulatory domain comprises a CD28 costimulatory domain, for example, a human CD28 costimulatory domain. In some embodiments, the CD28 costimulatory domain comprises or consists of an amino acid sequence set forth in SEQ ID NO: 14016 or an amino acid sequence that is at least 80% identical (e.g., at least 80%, at least 85%, at least 90%, at least 95%, at least 96%, at least 97%, at least 98%, at least 99%, or 100% identical) to the amino acid sequence set forth in SEQ ID NO: 14016.

[0394] In some embodiments, the intracellular signaling domain of the BCMA CAR comprises a CD3 zeta (2) signaling domain, for example, a human CD3ζ signaling domain. In some embodiments, the CD37 signaling domain comprises or consists of an amino acid sequence set forth in SEQ ID NO: 14017 or an amino acid sequence that is at least 80% identical (e.g., at least 80%, at least 85%, at least 90%, at least 95%, at least 96%, at least 97%, at least 98%, at least 99%, or 100% identical) to the amino acid sequence set forth in SEQ ID NO: 14017.

[0395] In some embodiments, the polycistronic vector comprises an expression cassette that contains a nucleotide sequence encoding a BCMA CAR, including, for example, a BCMA CAR comprising any of the BCMA-specific extracellular binding domains as described, the CD4 hinge domain of SEQ ID NO: 14006, the CD4 transmembrane domain of SEQ ID NO: 14011, the 4-1BB costimulatory domain of SEQ ID NO: 14015, the CD34 signaling domain of SEQ ID NO: 14017, and/or variants (i.e., having a sequence that is at least 80% identical, for example, at least 80%, at least 85%, at least 90%, at least 95%, at least 96%, at least 97%, at least 98%, or at least 99 identical to the disclosed sequence) thereof. In any of these embodiments, the BCMA CAR additionally comprises a signal peptide (e.g., a CD4 signal peptide) as described.

[0396] In some embodiments, the polycistronic vector comprises an expression cassette that contains a nucleotide sequence encoding a BCMA CAR, including, for example, a BCMA CAR comprising any of the BCMA-specific extracellular binding domains as described, the CD4 hinge domain of SEQ ID NO: 14006, the CD4 transmembrane domain of SEQ ID NO: 14011, the CD28 costimulatory domain of SEQ ID NO: 14016, the CD34 signaling domain of SEQ ID NO: 14017, and/or variants (i.e., having a sequence that is at least 80% identical, for example, at least 80%, at least 85%, at least 90%, at least 95%, at least 96%, at least 97%, at least 98%, or at least 99 identical to the disclosed sequence) thereof. In any of these embodiments, the BCMA CAR additionally comprises a signal peptide as described.

[0397] In some embodiments, the polycistronic vector comprises an expression cassette that contains a nucleotide sequence encoding a BCMA CAR as set forth in SEQ ID NO: 14096 or is at least 80% identical (e.g., at least 80%, at least 85%, at least 90%, at least 95%, at least 96%, at least 97%, at least 98%, at least 99%, or 100% identical) to the nucleotide sequence set forth in SEQ ID NO: 14096 (see Table 15). The encoded BCMA CAR has a corresponding amino acid sequence set forth in SEQ ID NO: 14097 or is at least 80% identical (e.g., at least 80%, at least 85%, at least 90%, at least 95%, at least 96%, at least 97%, at least 98%, at least 99%, or 100% identical) to the amino acid sequence set forth in of SEQ ID NO: 14097, with the following components: CD4 signal peptide, CT103A scFv (V_{L}-Whitlow linker-V_{H}), CD4 hinge domain, CD4 transmembrane domain, 4-1BB costimulatory domain, and CD3ζ signaling domain.

[0398] In some embodiments, the polycistronic vector comprises an expression cassette that contains a nucleotide sequence encoding a commercially available embodiment of BCMA CAR, including, for example, idecabtagene vicleucel (ide-cel, also called bb2121). In some embodiments, the polycistronic vector comprises an expression cassette that contains a nucleotide sequence encoding idecabtagene vicleucel or portions thereof. Idecabtagene vicleucel comprises a BCMA CAR with the following components: the BB2121 binder, CD4 hinge domain, CD4 transmembrane domain, 4-1BB costimulatory domain, and CD37 signaling domain.

TABLE 15
Exemplary sequences of BCMA CARs

| SEQ ID NO: | Sequence | Description |
|---|---|---|
| 14096 | atggccttaccagtgaccgccttgctcctgccgctggcctt- | Exemplary BCMA |
| | gctgctccac- | CAR nucleotide |
| | gccgccaggccggacatccagatgacccagtctccatc | sequence |
| | ctccctgtctgcatctgtaggagacagagtcaccatcac- | |
| | ttgccgggcaagtcagagcatt- | |
| | agcagctatttaaattggtatcagcagaaaccagggaaa | |
| | gcccctaagctcctgatctatgctgcatccagttt- | |
| | gcaaagtggggtcccatcaaggttcag- | |
| | tggcagtggatctgggacagatttcactctcaccatcagc | |
| | agtctgcaacctgaagattttgcaacttactactgtcag- | |
| | caaaaatacgacctcctcac- | |
| | ttttggcggagggaccaaggttgagatcaaaggcagca | |
| | ccagcggctccggcaagcctggctctggcgagggcag- | |
| | cacaaagggacagctgcagctgcag- | |
| | gagtcgggcccaggactggtgaagccttcggagaccct | |
| | gtccctcacctgcactgtctctggtggctccatcagcag- | |
| | tagtagttactactggggctg- | |
| | gatccgccagcccccagggaaggggctggagtggattg | |
| | ggagtatctcctatagtgggagcacctacta- | |
| | caacccgtccctcaagagtcgagtcac- | |
| | catatccgtagacacgtccaagaaccagttctccctgaag | |
| | ctgagttctgtgaccgccgcagacacggcggtg- | |
| | tactactgcgccagagatcgtggagacac- | |
| | catactagacgtatggggtcagggtacaatggtcaccgtc | |
| | agctcattcgtgcccgtgttcctgcccgccaaacctac- | |
| | caccacccctgcccctagac- | |
| | ctcccaccccagccccaacaatcgccagccagcctctgt | |
| | ctctgcggcccgaagcctgtagacctgctgccggcg- | |
| | gagccgtgcacaccagaggcctg- | |
| | gacttcgcctgcgacatctacatctgggcccctctggccg | |
| | gcac- | |
| | ctgtggcgtgctgctgctgagcctggtgatcaccctg- | |
| | tactgcaaccaccg- | |
| | gaacaaacggggcagaaagaaactcctgtatatattca | |
| | aacaaccatttatgagaccagtacaaactactcaagag- | |
| | gaagatggctgtagctgccgat- | |
| | ttccagaagaagaagaaggaggatgtgaactgagagtg | |
| | aagttcagcagatccgccgacgcccctgcctaccag- | |
| | cagggacagaaccagctgtacaac- | |
| | gagctgaacctgggcagacgggaagagtacgacgtgct | |
| | ggacaagcggagaggccgggaccccgagatgggcg- | |
| | gaaagcccagacggaagaacccccag- | |
| | gaaggcctgtataacgaactgcagaaagacaagatgg | |
| | ccgaggcctacagcgagatcgg- | |
| | catgaagggcgagcggaggcgcggcaagggccac- | |
| | gatggcctgtaccagggcctgagcaccgccaccaagga | |
| | cacctacgacgccctg- | |
| | cacatgcaggccctgccccccaga | |
| 14097 | MAL- | Exemplary BCMA |
| | PVTALLLPLALLLHAARPDIQMTQSPSSLS | CAR amino acid |
| | ASVGDRVTITCRASQSIS- | sequence |
| | SYLNWYQQKPGKAPKLLIYAAS- | |
| | SLQSGVPSRFSGSGSGTDFT- | |
| | LTISSLQPEDFATYYCQQKYDLLTFGGGT | |
| | KVEIKGSTSGSGKPGSGEGSTKGQLQLQ | |
| | ESGPGLVKPSETLSLTCTVSGGSIS- | |
| | SSSYYWGWIRQPPGKGLEWIG- | |
| | SISYSGSTYYNPSLKSRVTISVDTSKNQF | |
| | SLKLSSVTAADTAVYYCARDRGDTIL- | |
| | DVWGQGTMVTVSS- | |
| | FVPVFLPAKPTTTPAPRPPTPAP- | |
| | TIASQPLSLRPEACRPAAGGAVHTRGLDF | |
| | ACDIYIWAPLAGTCGVLLLSLVITLYC- | |
| | NHRNKRGRKKLLY- | |
| | IFKQPFMRPVQTTQEEDGCSCRFPEEEE | |
| | GGCELRVKFSRSADAPA- | |
| | YQQGQNQLYNELNLGR- | |
| | REEYDVLDKRRGRDPEMGGKPRR- | |
| | KNPQEGLYNELQKDKMAEAYSEIGMKGE | |
| | RRRGKGHDGLYQGLSTAT- | |
| | KDTYDALHMQALPPR | |

[0399] In some embodiments, the antibody portion of the recombinant receptor, e.g., CAR, further includes a spacer between the transmembrane domain and extracellular antigen binding domain. In some embodiments, the spacer includes at least a portion of an immunoglobulin constant region, such as a hinge region, e.g., an IgG4 hinge region, and/or a CH1/CL and/or Fc region. In some embodiments, the constant region or portion is of a human IgG, such as IgG4 or IgGI. In some aspects, the portion of the constant region serves as a spacer region between the antigen-recognition component, e.g., scFv, and transmembrane domain. The spacer can be of a length that provides for increased responsiveness of the cell following antigen binding, as compared to in the absence of the spacer. Exemplary spacers include, but are not limited to, those described in Hudecek et al. (2013) Clin. Cancer Res., 19:3153, WO2014031687, U.S. Pat. No. 8,822,647 or published app. No. US 2014/0271635. In some embodiments, the constant region or portion is of a human IgG, such as IgG4 or IgGI.

[0400] In some embodiments, the antigen receptor comprises an intracellular domain linked directly or indirectly to the extracellular domain. In some embodiments, the chimeric antigen receptor includes a transmembrane domain linking the extracellular domain and the intracellular signaling domain. In some embodiments, the intracellular signaling domain comprises an ITAM. For example, in some aspects, the antigen recognition domain (e.g. extracellular domain) generally is linked to one or more intracellular signaling components, such as signaling components that mimic activation through an antigen receptor complex, such as a TCR complex, in the case of a CAR, and/or signal via another cell surface receptor. In some embodiments, the chimeric receptor comprises a transmembrane domain linked or fused between the extracellular domain (e.g. scFv) and intracellular signaling domain. Thus, in some embodiments, the antigen-binding component (e.g., antibody) is linked to one or more transmembrane and intracellular signaling domains.

[0401] In some embodiments, a transmembrane domain that naturally is associated with one of the domains in the receptor, e.g., CAR, is used. In some instances, the transmembrane domain is selected or modified by amino acid substitution to avoid binding of such domains to the transmembrane domains of the same or different surface membrane proteins to minimize interactions with other members of the receptor complex.

[0402] The transmembrane domain in some embodiments is derived either from a natural or from a synthetic source. Where the source is natural, the domain in some aspects is derived from any membrane-bound or transmembrane protein. Transmembrane regions include those derived from (i.e. comprise at least the transmembrane region(s) of) the alpha, beta or zeta chain of the T-cell receptor, CD28, CD3 epsilon, CD45, CD4, CD5, CD8, CD9, CD16, CD22, CD33, CD37, CD64, CD80, CD86, CD134, CD137, CD154. Alternatively, the transmembrane domain in some embodiments is synthetic. In some aspects, the synthetic transmembrane domain comprises predominantly hydrophobic residues such as leucine and valine. In some aspects, a triplet of phenylalanine, tryptophan and valine will be found at each end of a synthetic transmembrane domain. In some embodiments, the linkage is by linkers, spacers, and/or transmembrane domain(s). In some aspects, the transmembrane domain contains a transmembrane portion of CD28.

[0403] In some embodiments, the extracellular domain and transmembrane domain is linked directly or indirectly. In some embodiments, the extracellular domain and transmembrane are linked by a spacer, such as any described herein. In some embodiments, the receptor contains extracellular portion of the molecule from which the transmembrane domain is derived, such as a CD28 extracellular portion.

[0404] Among the intracellular signaling domains are those that mimic or approximate a signal through a natural antigen receptor, a signal through such a receptor in combination with a costimulatory receptor, and/or a signal through a costimulatory receptor alone. In some embodiments, a short oligo- or polypeptide linker, for example, a linker of 2 to 10 amino acids in length, such as one containing glycines and serines, e.g., glycine-serine doublet, is present and forms a linkage between the transmembrane domain and the cytoplasmic signaling domain of the CAR.

[0405] T cell activation is in some aspects described as being mediated by two classes of cytoplasmic signaling sequences: those that initiate antigen-dependent primary activation through the TCR (primary cytoplasmic signaling sequences), and those that act in an antigen-independent manner to provide a secondary or co-stimulatory signal (secondary cytoplasmic signaling sequences). In some aspects, the CAR includes one or both of such signaling components.

[0406] The receptor, e.g., the CAR, generally includes at least one intracellular signaling component or components. In some aspects, the CAR includes a primary cytoplasmic signaling sequence that regulates primary activation of the TCR complex. Primary cytoplasmic signaling sequences that act in a stimulatory manner may contain signaling motifs which are known as immunoreceptor tyrosine-based activation motifs or ITAMs. Examples of ITAM containing primary cytoplasmic signaling sequences include those derived from CD3 zeta chain, FcR gamma, CD3 gamma, CD3 delta and CD3 epsilon. In some embodiments, cytoplasmic signaling molecule(s) in the CAR contain(s) a cytoplasmic signaling domain, portion thereof, or sequence derived from CD3 zeta.

[0407] In some embodiments, the receptor includes an intracellular component of a TCR complex, such as a TCR CD3 chain that mediates T-cell activation and cytotoxicity, e.g., CD3 zeta chain. Thus, in some aspects, the antigen-binding portion is linked to one or more cell signaling modules. In some embodiments, cell signaling modules include a CD3 transmembrane domain, CD3 intracellular signaling domains, and/or other CD transmembrane domains. In some embodiments, the intracellular component is or includes a CD3-zeta intracellular signaling domain. In some embodiments, the intracellular component is or includes a signaling domain from a Fc receptor gamma chain. In some embodiments, the receptor, e.g., CAR, includes the intracellular signaling domain and further includes a portion, such as a transmembrane domain and/or hinge portion, of one or more additional molecules such as CD8, CD4, CD25, or CD16. For example, in some aspects, the CAR or other chimeric receptor is a chimeric molecule of CD3-zeta (CD3-z) or Fc receptor gamma and a portion of one of CD8, CD4, CD25 or CD16.

[0408] In some embodiments, upon ligation of the CAR or other chimeric receptor, the cytoplasmic domain or intracellular signaling domain of the receptor activates at least one of the normal effector functions or responses of the immune cell, e.g., T cell engineered to express the CAR. For example, in some contexts, the CAR induces a function of a T cell such as cytolytic activity or T-helper activity, such as secretion of cytokines or other factors. In some embodiments, a truncated portion of an intracellular signaling domain of an antigen receptor component or costimulatory molecule is used in place of an intact immunostimulatory chain, for example, if it transduces the effector function signal. In some embodiments, the intracellular signaling domain or domains include the cytoplasmic sequences of the T cell receptor (TCR), and in some aspects also those of co-receptors that in the natural context act in concert with such receptors to initiate signal transduction following antigen receptor engagement.

[0409] In the context of a natural TCR, full activation generally requires not only signaling through the TCR, but also a costimulatory signal. Thus, in some embodiments, to promote full activation, a component for generating secondary or co-stimulatory signal is also included in the CAR. In other embodiments, the CAR does not include a component for generating a costimulatory signal. In some aspects, an additional CAR is expressed in the same cell and provides the component for generating the secondary or costimulatory signal.

[0410] In some embodiments, the chimeric antigen receptor contains an intracellular domain of a T cell costimulatory molecule. In some embodiments, the CAR includes a signaling domain and/or transmembrane portion of a costimulatory receptor, such as CD28, 4-1BB, 0X40, DAP10, and ICOS. In some aspects, the same CAR includes both the activating and costimulatory components. In some embodiments, the chimeric antigen receptor contains an intracellular domain derived from a T cell costimulatory molecule or a functional variant thereof, such as between the transmembrane domain and intracellular signaling domain. In some aspects, the T cell costimulatory molecule is CD28 or 41BB.

[0411] In some embodiments, the activating domain is included within one CAR, whereas the costimulatory component is provided by another CAR recognizing another antigen. In some embodiments, the CARs include activating or stimulatory CARs, costimulatory CARs, both expressed on the same cell (see WO2014/055668). In some aspects, the cells include one or more stimulatory or activating CARs and/or a costimulatory CAR. In some embodiments, the cells further include inhibitory CARs (iCARs, see Fedorov et al., Sci. Transl. Medicine, 5(215) (December 2013), such as a CAR recognizing an antigen other than the one associated with and/or specific for the disease or condition whereby an activating signal delivered through the disease-targeting CAR is diminished or inhibited by binding of the inhibitory CAR to its ligand, e.g., to reduce off-target effects.

[0412] In certain embodiments, the intracellular signaling domain comprises a CD28 transmembrane and signaling domain linked to a CD3 (e.g., CD3-zeta) intracellular domain. In some embodiments, the intracellular signaling domain comprises a chimeric CD28 and CD137 (4-1BB, TNFRSF9) co-stimulatory domains, linked to a CD3 zeta intracellular domain.

[0413] In some embodiments, the CAR encompasses one or more, e.g., two or more, costimulatory domains and an activation domain, e.g., primary activation domain, in the cytoplasmic portion. Exemplary CARs include intracellular components of CD3-zeta, CD28, and 4-1BB.

[0414] In some embodiments the intracellular signaling domain includes intracellular components of a 4-1BB signaling domain and a CD3-zeta signaling domain. In some embodiments, the intracellular signaling domain includes intracellular components of a CD28 signaling domain and a CD3zeta signaling domain.

[0415] In some embodiments, the CAR comprises an extracellular antigen binding domain (e.g., antibody or antibody fragment, such as an scFv) that binds to an antigen (e.g. tumor antigen), a spacer (e.g. containing a hinge domain, such as any as described herein), a transmembrane domain (e.g. any as described herein), and an intracellular signaling domain (e.g. any intracellular signaling domain, such as a primary signaling domain or costimulatory signaling domain as described herein). In some embodiments, the intracellular signaling domain is or includes a primary cytoplasmic signaling domain. In some embodiments, the intracellular signaling domain additionally includes an intracellular signaling domain of a costimulatory molecule (e.g., a costimulatory domain). Examples of exemplary components of a CAR are described in Table 16. In provided aspects, the sequences of each component in a CAR can include any combination listed in Table 16.

TABLE 16

| | | SEQ ID |
|---|---|---|
| Component | Sequence | NO: |
| Extracellular | | |
| binding domain | | |
| Anti-CD19 scFv | DIQMTQTTSSLSASLGDRVTISCRASQDISKYLNWYQQKPDG | 14098 |
| (FMC63) | TVKLLIYHTSRLHSGVPSRFSGSGSGTDYSLTISNLEQEDIATY | |
| | FCQQGNTLPYTFGGGTKLEITGSTSGSGKPGSGEGSTKGEV | |
| | KLQESGPGLVAPSQSLSVTCTVSGVSLPDYGVSWIRQPPRKG | |
| | LEWLGVIWGSETTYYNSALKSRLTIIKDNSKSQVFLKMNSLQT | |
| | DDTAIYYCAKHYYYGGSYAMDYWGQGTSVTVSS | |
| Anti-CD19 scFv | DIQMTQTTSSLSASLGDRVTISCRASQDISKYLNWYQQKPDG | 14099 |
| (FMC63) | TVKLLIYHTSRLHSGVPSRFSGSGSGTDYSLTISNLEQEDIATY | |
| | FCQQGNTLPYTFGGGTKLEITGGGGSGGGGSGGGGSEVKL | |
| | QESGPGLVAPSQSLSVTCTVSGVSLPDYGVSWIRQPPRKGLE | |
| | WLGVIWGSETTYYNSALKSRLTIIKDNSKSQVFLKMNSLQTDD | |
| | TAIYYCAKHYYYGGSYAMDYWGQGTSVTVSS | |
| Anti-BCMA sdAb | QVQLVESGGGLVQPGGSLRLSCAASGFTFTNHAMSWVRQA | 14100 |
| (FHVH74) | PGKGLELVSSISGNGRTTYYADSVKGRFTISRDISKNTLDLQM | |
| | NSLRAEDTAVYYCAKDGGETLVDSRGQGTLVTVSS | |
| Anti-BCMA sdAb | QVQLVESGGGLVQPGGSLRLSCAASGFTFSSHAMTWVRQAP | 14101 |
| (FHVH32) | GKGLEWVAAISGSGDFTHYADSVKGRFTISRDNSKNTVSLQM | |
| | NNLRAEDTAVYYCAKDEDGGSLLGYRGQGTLVTVSS | |
| Anti-BCMA sdAb | EVQLLESGGGLVQPGGSLRLSCAASGFTFSSYAMSWVRQAP | 14102 |
| (FHVH33) | GKGLEWVSSISGSGDYIYYADSVKGRFTISRDISKNTLYLQMN | |
| | SLRAEDTAVYYCAKEGTGANSSLADYRGQGTLVTVSS | |
| Anti-BCMA sdAb | EVQLLESGGGLIQPGGSLRLSCAASGFTFSSHAMTWVRQAP | 14103 |
| (FHVH93) | GKGLEWVSAISGSGDYTHYADSVKGRFTISRDNSKNTVYLQM | |
| | NSLRAEDSAVYYCAKDEDGGSLLGHRGQGTLVTVSS | |
| Spacer (e.g. | | |
| hinge) | | |
| IgG4 Hinge | ESKYGPPCPPCP | 14104 |
| CD8 Hinge | TTTPAPRPPTPAPTIASQPLSLRPE | 14105 |
| CD28 | IEVMYPPPYLDNEKSNGTIIHVKGKHLCPSPLFPGPSKP | 14106 |
| Transmembrane | | |
| CD8 | ACRPAAGGAVHTRGLDFACDIYIWAPLAGTCGVLLLSLVITLY | 14107 |
| | C | |
| CD28 | FWVLVVVGGVLACYSLLVTVAFIIFWV | 14108 |
| CD28 | FWVLVVVGGVLACYSLLVTVAFIIFWV | 14109 |
| Costimulatory domain | | |
| CD28 | RSKRSRLLHSDYMNMTPRRPGPTRKHYQPYAPPRDFAAYRS | 14110 |
| 4-1BB | KRGRKKLLYIFKQPFMRPVQTTQEEDGCSCRFPEEEEGGCEL | 14111 |
| Primary Signaling | | |
| Domain | | |
| | RVKFSRSADAPAYQQGQNQLYNELNLGRREEYDVLDKRRGR | 14112 |
| | DPEMGGKPRRKNPQEGLYNELQKDKMAEAYSEIGMKGERR | |
| | RGKGHDGLYQGLSTATKDTYDALHMQALPPR | |
| CD3zeta | RVKFSRSADAPAYKQGQNQLYNELNLGRREEYDVLDKRRGR | 14113 |
| | DPEMGGKPRRKNPQEGLYNELQKDKMAEAYSEIGMKGERR | |
| | RGKGHDGLYQGLSTATKDTYDALHMQALPPR | |

[0416] In some embodiments, the antigen receptor further includes a marker and/or cells expressing the CAR or other antigen receptor further include a surrogate marker, such as a cell surface marker, which is used to confirm transduction or engineering of the cell to express the receptor. In some aspects, the marker includes all or part (e.g., truncated form) of CD34, a NGFR, or epidermal growth factor receptor, such as truncated version of such a cell surface receptor (e.g., tEGFR). In some embodiments, the nucleic acid encoding the marker is operably linked to a polynucleotide encoding a linker sequence, such as a cleavable linker sequence, e.g., T2A. For example, a marker, and optionally a linker sequence, can be any as disclosed in published patent application No. WO2014031687. For example, the marker can be a truncated EGFR (tEGFR) that is, optionally, linked to a linker sequence, such as a T2A cleavable linker sequence.

[0417] In some embodiments, the marker is a molecule, e.g., cell surface protein, not naturally found on T cells or not naturally found on the surface of T cells, or a portion thereof. In some embodiments, the molecule is a non-self molecule, e.g., non-self protein, i.e., one that is not recognized as “self” by the immune system of the host into which the cells will be adoptively transferred.

[0418] In some embodiments, the marker serves no therapeutic function and/or produces no effect other than to be used as a marker for genetic engineering, e.g., for selecting cells successfully engineered. In other embodiments, the marker is a therapeutic molecule or molecule otherwise exerting some desired effect, such as a ligand for a cell to be encountered in vivo, such as a costimulatory or immune checkpoint molecule to enhance and/or dampen responses of the cells upon adoptive transfer and encounter with ligand.

[0419] In some cases, CARs are referred to as first, second, and/or third generation CARs. In some aspects, a first generation CAR is one that solely provides a CD3-chain induced signal upon antigen binding; in some aspects, a second-generation CAR is one that provides such a signal and costimulatory signal, such as one including an intracellular signaling domain from a costimulatory receptor such as CD28 or CD 137; in some aspects, a third generation CAR is one that includes multiple costimulatory domains of different costimulatory receptors.

[0420] For example, in some embodiments, the CAR contains an antibody, e.g., an antibody fragment, a transmembrane domain that is or contains a transmembrane portion of CD28 or a functional variant thereof, and an intracellular signaling domain containing a signaling portion of CD28 or functional variant thereof and a signaling portion of CD3 zeta or functional variant thereof. In some embodiments, the CAR contains an antibody, e.g., antibody fragment, a transmembrane domain that is or contains a transmembrane portion of CD28 or a functional variant thereof, and an intracellular signaling domain containing a signaling portion of a 4-IBB or functional variant thereof and a signaling portion of CD3 zeta or functional variant thereof. In some such embodiments, the receptor further includes a spacer containing a portion of an Ig molecule, such as a human Ig molecule, such as an Ig hinge, e.g. an IgG4 hinge, such as a hinge-only spacer.

[0421] In some aspects, the spacer contains only a hinge region of an IgG, such as only a hinge of IgG4 or IgG. In other embodiments, the spacer is or contains an Ig hinge, e.g., an IgG4-derived hinge, optionally linked to a CH2 and/or CH3 domains. In some embodiments, the spacer is an Ig hinge, e.g., an IgG4 hinge, linked to CH2 and CH3 domains. In some embodiments, the spacer is an Ig hinge, e.g., an IgG4 hinge, linked to a CH3 domain only. In some embodiments, the spacer is or comprises a glycine-serine rich sequence or other flexible linker such as known flexible linkers.

[0422] For example, in some embodiments, the CAR includes an antibody such as an antibody fragment, including scFvs, a spacer, such as a spacer containing a portion of an immunoglobulin molecule, such as a hinge region and/or one or more constant regions of a heavy chain molecule, such as an Ig-hinge containing spacer, a transmembrane domain containing all or a portion of a CD28-derived transmembrane domain, a CD28-derived intracellular signaling domain, and a CD3 zeta signaling domain. In some embodiments, the CAR includes an antibody or fragment, such as scFv, a spacer such as any of the Ig-hinge containing spacers, a CD28-derived transmembrane domain, a 4-IBB-derived intracellular signaling domain, and a CD3 zeta-derived signaling domain.

[0423] The recombinant receptors, such as CARs, expressed by the cells administered to the subject generally recognize or specifically bind to a molecule that is expressed in, associated with, and/or specific for the disease or condition or cells thereof being treated. Upon specific binding to the molecule, e.g., antigen, the receptor generally delivers an immunostimulatory signal, such as an ITAM-transduced signal, into the cell, thereby promoting an immune response targeted to the disease or condition. For example, in some embodiments, the cells express a CAR that specifically binds to an antigen expressed by a cell or tissue of the disease or condition or associated with the disease or condition.

b. T Cell Receptors Antigen Receptors (TCRs)

[0424] In some embodiments, engineered cells, such as T cells, used in connection with the provided methods, uses, articles of manufacture or compositions are cells that express a T cell receptor (TCR) or antigen-binding portion thereof that recognizes a protein epitope or T cell epitope of a target protein, such as an antigen of a tumor, viral or autoimmune protein.

[0425] In some embodiments, a “T cell receptor” or “TCR” is a molecule that contains variable α and β chains (also known as TCRalpha and TCRbeta, respectively) or a variable γ and δ chains (also known as TCRgamma and TCRdelta, respectively), or antigen-binding portions thereof, and which is capable of specifically binding to a polypeptide bound to an MHC molecule. In some embodiments, the TCR is in the αβ form. Typically, TCRs that exist in αβ and γδ forms are generally structurally similar, but T cells expressing them may have distinct anatomical locations or functions. A TCR can be found on the surface of a cell or in soluble form. Generally, a TCR is found on the surface of T cells (or T lymphocytes) where it is generally responsible for recognizing antigens bound to major histocompatibility complex (MHC) molecules.

[0426] Unless otherwise stated, the term “TCR” should be understood to encompass full TCRs as well as antigen-binding portions or antigen-binding fragments thereof. In some embodiments, the TCR is an intact or full-length TCR, including TCRs in the ab form or gd form. In some embodiments, the TCR is an antigen-binding portion that is less than a full-length TCR but that binds to a specific peptide bound in an MHC molecule, such as binds to an MHC-peptide complex. In some cases, an antigen-binding portion or fragment of a TCR can contain only a portion of the structural domains of a full-length or intact TCR, but yet is able to bind the peptide epitope, such as MHC-peptide complex, to which the full TCR binds. In some cases, an antigen-binding portion contains the variable domains of a TCR, such as variable a chain and variable b chain of a TCR, sufficient to form a binding site for binding to a specific MHC-peptide complex. Generally, the variable chains of a TCR contain complementarity determining regions involved in recognition of the peptide, MHC and/or MHC-peptide complex.

c. Multi-Targeting

[0427] In some embodiments, the cells used in connection with the provided methods, uses, articles of manufacture and compositions include cells employing multi-targeting strategies, such as expression of two or more genetically engineered receptors on the cell, each recognizing the same of a different antigen and typically each including a different intracellular signaling component. Such multi-targeting strategies are described, for example, in WO 2014055668 (describing combinations of activating and costimulatory CARs, e.g., targeting two different antigens present individually on off-target, e.g., normal cells, but present together only on cells of the disease or condition to be treated) and Fedorov et al., Sci. Transl. Medicine, 5(215) (2013) (describing cells expressing an activating and an inhibitory CAR, such as those in which the activating CAR binds to one antigen expressed on both normal or non-diseased cells and cells of the disease or condition to be treated, and the inhibitory CAR binds to another antigen expressed only on the normal cells or cells which it is not desired to treat).

[0428] For example, in some embodiments, the cells include a receptor expressing a first genetically engineered antigen receptor (e.g., CAR) which is capable of inducing an activating or stimulatory signal to the cell, generally upon specific binding to the antigen recognized by the first receptor, e.g., the first antigen. In some embodiments, the cell further includes a second genetically engineered antigen receptor (e.g., CAR), e.g., a chimeric costimulatory receptor, which is capable of inducing a costimulatory signal to the immune cell, generally upon specific binding to a second antigen recognized by the second receptor. In some embodiments, the first antigen and second antigen are the same. In some embodiments, the first antigen and second antigen are different.

[0429] In some embodiments, the first and/or second genetically engineered antigen receptor (e.g. CAR) is capable of inducing an activating signal to the cell. In some embodiments, the receptor includes an intracellular signaling component containing ITAM or ITAM-like motifs. In some embodiments, the activation induced by the first receptor involves a signal transduction or change in protein expression in the cell resulting in initiation of an immune response, such as ITAM phosphorylation and/or initiation of ITAM-mediated signal transduction cascade, formation of an immunological synapse and/or clustering of molecules near the bound receptor (e.g. CD4 or CD8, etc.), activation of one or more transcription factors, such as NF-KB and/or AP-1, and/or induction of gene expression of factors such as cytokines, proliferation, and/or survival.

[0430] In some embodiments, the first and/or second receptor includes intracellular signaling domains or regions of costimulatory receptors such as CD28, CD137 (4-1BB), OX40, and/or ICOS. In some embodiments, the first and second receptor include an intracellular signaling domain of a costimulatory receptor that are different. In some embodiments, the first receptor contains a CD28 costimulatory signaling region and the second receptor contain a 4-IBB co-stimulatory signaling region or vice versa.

[0431] In some embodiments, the first and/or second receptor includes both an intracellular signaling domain containing ITAM or ITAM-like motifs and an intracellular signaling domain of a costimulatory receptor.

[0432] In some embodiments, the first receptor contains an intracellular signaling domain containing ITAM or ITAM-like motifs and the second receptor contains an intracellular signaling domain of a costimulatory receptor. The costimulatory signal in combination with the activating signal induced in the same cell is one that results in an immune response, such as a robust and sustained immune response, such as increased gene expression, secretion of cytokines and other factors, and T cell mediated effector functions such as cell killing.

[0433] In some embodiments, neither ligation of the first receptor alone nor ligation of the second receptor alone induces a robust immune response. In some aspects, if only one receptor is ligated, the cell becomes tolerized or unresponsive to antigen, or inhibited, and/or is not induced to proliferate or secrete factors or carry out effector functions. In some such embodiments, however, when the plurality of receptors are ligated, such as upon encounter of a cell expressing the first and second antigens, a desired response is achieved, such as full immune activation or stimulation, e.g., as indicated by secretion of one or more cytokine, proliferation, persistence, and/or carrying out an immune effector function such as cytotoxic killing of a target cell.

[0434] In some embodiments, the two receptors induce, respectively, an activating and an inhibitory signal to the cell, such that binding by one of the receptors to its antigen activates the cell or induces a response, but binding by the second inhibitory receptor to its antigen induces a signal that suppresses or dampens that response. Examples are combinations of activating CARs and inhibitory CARs or iCARs. Such a strategy may be used, for example, in which the activating CAR binds an antigen expressed in a disease or condition but which is also expressed on normal cells, and the inhibitory receptor binds to a separate antigen which is expressed on the normal cells but not cells of the disease or condition.

[0435] In some embodiments, the multi-targeting strategy is employed in a case where an antigen associated with a particular disease or condition is expressed on a non-diseased cell and/or is expressed on the engineered cell itself, either transiently (e.g., upon stimulation in association with genetic engineering) or permanently. In such cases, by requiring ligation of two separate and individually specific antigen receptors, specificity, selectivity, and/or efficacy may be improved.

[0436] In some embodiments, the plurality of antigens, e.g., the first and second antigens, are expressed on the cell, tissue, or disease or condition being targeted, such as on the cancer cell. In some aspects, the cell, tissue, disease or condition is multiple myeloma or a multiple myeloma cell. In some embodiments, one or more of the plurality of antigens generally also is expressed on a cell which it is not desired to target with the cell therapy, such as a normal or non-diseased cell or tissue, and/or the engineered cells themselves. In such embodiments, by requiring ligation of multiple receptors to achieve a response of the cell, specificity and/or efficacy is achieved.

d. Chimeric Auto-Antibody Receptor (CAAR)

[0437] In some embodiments, the recombinant receptor is a chimeric autoantibody receptor (CAAR). In some embodiments, the CAAR binds, e.g., specifically binds, or recognizes, an autoantibody. In some embodiments, a cell expressing the CAAR, such as a T cell engineered to express a CAAR, is used to bind to and kill autoantibody-expressing cells, but not normal antibody expressing cells. In some embodiments, CAAR-expressing cells are used to treat an autoimmune disease associated with expression of self-antigens, such as autoimmune diseases. In some embodiments, CAAR-expressing cells target B cells that ultimately produce the autoantibodies and display the autoantibodies on their cell surfaces, marking these B cells as disease-specific targets for therapeutic intervention. In some embodiments, CAAR-expressing cells are used to efficiently target and kill the pathogenic B cells in autoimmune diseases by targeting the disease-causing B cells using an antigen-specific chimeric autoantibody receptor. In some embodiments, the recombinant receptor is a CAAR, such as any described in U.S. Patent Application Pub. No. US 2017/0051035.

[0438] In some embodiments, the CAAR comprises an autoantibody binding domain, a transmembrane domain, and one or more intracellular signaling region or domain (also interchangeably called a cytoplasmic signaling domain or region). In some embodiments, the intracellular signaling region comprises an intracellular signaling domain. In some embodiments, the intracellular signaling domain is or comprises a primary signaling domain, a signaling domain that is capable of stimulating and/or inducing a primary activation signal in a T cell, a signaling domain of a T cell receptor (TCR) component (e.g. an intracellular signaling domain or region of a CD3-zeta) chain or a functional variant or signaling portion thereof), and/or a signaling domain comprising an immunoreceptor tyrosine-based activation motif (ITAM).

[0439] In some embodiments, the autoantibody binding domain comprises an autoantigen or a fragment thereof. The choice of autoantigen can depend upon the type of autoantibody being targeted. For example, the autoantigen may be chosen because it recognizes an autoantibody on a target cell, such as a B cell, associated with a particular disease state, e.g. an autoimmune disease, such as an autoantibody-mediated autoimmune disease. In some embodiments, the autoimmune disease includes pemphigus vulgaris (PV). Exemplary autoantigens include desmoglein 1 (Dsgl) and Dsg3.

[0440] In some embodiments, the encoded nucleic acid is operatively linked to a “positive target cell-specific regulatory element” (or positive TCSRE). In some embodiments, the positive TCSRE is a functional nucleic acid sequence. In some embodiments, the positive TCSRE comprises a promoter or enhancer. In some embodiments, the TCSRE is a nucleic acid sequence that increases the level of an exogenous agent in a target cell. In some embodiments, the positive target cell-specific regulatory element comprises a T cell-specific promoter, a T cell-specific enhancer, a T cell-specific splice site, a T cell-specific site extending half-life of an RNA or protein, a T cell-specific mRNA nuclear export promoting site, a T cell-specific translational enhancing site, or a T cell-specific post-translational modification site. In some embodiments, the T cell-specific promoter is a promoter described in Immgen consortium, herein incorporated by reference in its entirety, e.g., the T cell-specific promoter is an IL2RA (CD25), LRRC32, FOXP3, or IKZF2 promoter. In some embodiments, the T cell-specific promoter or enhancer is a promoter or enhancer described in Schmidl et al., Blood. 2014 Apr. 24; 123(17):e68-78., herein incorporated by reference in its entirety. In some embodiments, the T cell-specific promoter is a transcriptionally active fragment of any of the foregoing. In some embodiments, the T-cell specific promoter is a variant having at least 70%, 75%, 80%, 85%, 90%, 95%, 96%, 97%, 98%, or 99% identity to any of the foregoing.

[0441] In some embodiments, the encoded nucleic acid is operatively linked to a “negative target cell-specific regulatory element” (or negative TCSRE). In some embodiments, the negative TCSRE is a functional nucleic acid sequence. In some embodiments, the negative TCSRE is a miRNA recognition site that causes degradation of inhibition of the viral vector in a non-target cell. In some embodiments, the exogenous agent is operatively linked to a “non-target cell-specific regulatory element” (or NTCSRE). In some embodiments, the NTCSRE comprises a nucleic acid sequence that decreases the level of an exogenous agent in a non-target cell compared to in a target cell. In some embodiments, the NTCSRE comprises a non-target cell-specific miRNA recognition sequence, non-target cell-specific protease recognition site, non-target cell-specific ubiquitin ligase site, non-target cell-specific transcriptional repression site, or non-target cell-specific epigenetic repression site. In some embodiments, the NTCSRE comprises a tissue-specific miRNA recognition sequence, tissue-specific protease recognition site, tissue-specific ubiquitin ligase site, tissue-specific transcriptional repression site, or tissue-specific epigenetic repression site. In some embodiments, the NTCSRE comprises a non-target cell-specific miRNA recognition sequence, non-target cell-specific protease recognition site, non-target cell-specific ubiquitin ligase site, non-target cell-specific transcriptional repression site, or non-target cell-specific epigenetic repression site.

[0442] In some embodiments, the NTCSRE comprises a non-target cell-specific miRNA recognition sequence and the miRNA recognition sequence is able to be bound by one or more of miR3 1, miR363, or miR29c. In some embodiments, the NTCSRE is situated or encoded within a transcribed region encoding the exogenous agent, optionally wherein an RNA produced by the transcribed region comprises the miRNA recognition sequence within a UTR or coding region.

[0443] In some embodiments, the viral vector comprising an anti-CD4 scFv or sdAb composition described herein are administered to a subject, e.g., a mammal, e.g., a human. In such embodiments, the subject is at risk of, has a symptom of, or is diagnosed with or identified as having, a particular disease or condition (e.g., a disease or condition described herein).

[0444] In some aspects, resting or non-activated T cells are contacted with a viral vector of the disclosure (e.g., a retroviral vector or lentiviral vector) that includes a CD4 binding agent. The contacting may be performed in vitro (e.g., with T cells derived from a healthy donor or a donor in need of cellular therapy) or in vivo by administration of the viral vector to a subject. In some embodiments the process comprises a) obtaining whole blood from the subject; b) collecting the fraction of blood containing leukocyte components including CD4+ T cells; c) contacting the leukocyte components including CD4+ T cells with a composition comprising the lentiviral vector to create a transfection mixture; and d) reinfusing the contacted leukocyte components including CD4+ T cells and/or the transfection mixture to the subject, thereby administering the lipid particle and/or payload gene to the subject. In some embodiments, the T cells (e.g. CD4+ T cells) are not activated during the method. In some embodiments, step (c) of the method is carried out for no more than 24 hours, e.g., no more than 20, 16, 12, 8, 6, 5, 4, 3, 2, or 1 hour.

[0445] In some embodiments, the method according to the present disclosure is capable of delivering a lentiviral particle to an ex vivo system. The method includes the use of a combination of various apheresis machine hardware components, a software control module, and a sensor module to measure citrate or other solute levels in-line to ensure the maximum accuracy and safety of treatment prescriptions, and the use of replacement fluids designed to fully exploit the design of the system according to the present methods. It is understood that components described for one system according to the present invention can be implemented within other systems according to the present invention as well.

[0446] In some embodiments, the method for administration of the lentiviral vector to the subject comprises the use of a blood processing set for obtaining whole blood from the subject, a separation chamber for collecting the fraction of blood containing leukocyte components including CD4+ T cells, a contacting container for contacting the CD4+ T cells with the composition comprising the lentiviral vector, and a further fluid circuit for reinfusion of CD4+ T cells to the patient. In some embodiments, the method further comprises any of i) a washing component for concentrating T cells, and ii) a sensor and/or module for monitoring cell density and/or concentration. In some embodiments, the methods allow processing of blood directly from the patient, transduction with the lentiviral vector, and reinfusion directly to the patient without any steps of selection for T cells or for CD4+ T cells. Further the methods also can be carried out without cryopreserving or freezing any cells before or between any one or more of the steps, such that there is no step of formulating cells with a cryoprotectant, e.g. DMSO. In some embodiments, the provided methods do not include a lymphodepletion regimen. In some embodiments, the method including steps (a)-(d) are carried out for a time of no more than 24 hours, such as between 2 hours and 12 hours, for example 3 hours to 6 hours.

[0447] In some embodiments, the method for administration of the lentiviral vector to the subject comprises the use of a blood processing set for obtaining whole blood from the subject, a separation chamber for collecting the fraction of blood containing leukocyte components including CD4+ T cells, a contacting container for contacting the CD4+ T cells with the composition comprising the lentiviral vector, and a further fluid circuit for reinfusion of CD4+ T cells to the patient. In some embodiments, the method further comprises any of i) a washing component for concentrating T cells, and ii) a sensor and/or module for monitoring cell density and/or concentration. In some embodiments, the methods allow processing of blood directly from the patient, transduction with the lentiviral vector, and reinfusion directly to the patient without any steps of selection for T cells or for CD4+ T cells. Further the methods also can be carried out without cryopreserving or freezing any cells before or between any one or more of the steps, such that there is no step of formulating cells with a cryoprotectant, e.g. DMSO. In some embodiments, the provided methods do not include a lymphodepletion regimen. In some embodiments, the method including steps (a)-(d) are carried out for a time of no more than 24 hours, such as between 2 hours and 12 hours, for example 3 hours to 6 hours.

[0448] Also provided herein are systems for administration of a lentiviral vector comprising a CD4 binding agent to a subject. An exemplary system for administration is shown in FIG. 1.

[0449] In some embodiments, the resting or non-activated T cells are not treated with one or more T cell stimulatory molecules (e.g., an anti-CD-3 antibody), one or more T cell costimulatory molecules, and/or one or more T cell activating cytokines. In some embodiments, the resting or non-activated T cells are not treated with any of one or more T cell stimulatory molecules (e.g., an anti-CD-3 antibody), one or more T cell costimulatory molecules, and/or one or more T cell activating cytokines.

[0450] In additional aspects, the application includes methods of administration to a subject of a viral vector that includes an anti-CD4 binding agent, wherein the subject is not administered or has not been administered a T cell activating treatment. In some embodiments, the T cell activating treatment includes one or more T cell stimulatory molecules (e.g., an anti-CD-3 antibody), one or more T cell costimulatory molecules, and/or one or more T cell activating cytokines. In some embodiments, the subject is not administered or has not been administered any of one or more T cell stimulatory molecules (e.g., an anti-CD-3 antibody), one or more T cell costimulatory molecules, and/or one or more T cell activating cytokines. In some embodiments, the T cell activating treatment is lymphodepletion. In certain embodiments, the subject is not administered or has not been administered the T cell activating treatment within 1 month before or after administration of the viral vector. In some embodiments, the subject is not administered or has not been administered the T cell activating treatment within 1 month before administration of the viral vector, such as within or at or about 4 weeks, 3 weeks, 2 weeks or 1 weeks, such as at or about 1 day, 2 days, 3 days, 4 days, 5 days, 6 days or 7 days before administration of the viral vector. In some embodiments, the subject is not administered the T cell activating treatment within 1 month after administration of the viral vector, such as within or at or about 4 weeks, 3 weeks, 2 weeks or 1 weeks, such as at or about 1 day, 2 days, 3 days, 4 days, 5 days, 6 days or 7 days after administration of the viral vector.

[0451] In some aspects, the viral vectors of the disclosure do not include one or more T cell stimulatory molecules (e.g., an anti-CD-3 antibody), one or more T cell costimulatory molecules, and/or one or more T cell activating cytokines.

[0452] The use of anti-CD3 antibodies is well-known for activation of T cells. The anti-CD3 antibodies can be of any species, e.g., mouse, rabbit, human, humanized, or camelid. Exemplary antibodies include OKT3, CRIS-7, I2C the anti-CD3 antibody included in DYNABEADS Human T-Activator CD3/CD28 (Thermo Fisher), and the anti-CD3 domains of approved and clinically studied molecules such as blinatumomab, catumaxomab, fotetuzumab, teclistamab, ertumaxomab, epcoritamab, talquetamab, odronextamab, cibistamab, obrindatamab, tidutamab, duvortuxizumab, solitomab, eluvixtamab, pavurutamab, tepoditamab, vibecotamab, plamotamab, glofitamab, etevritamab, and tarlatamab.

[0453] In some embodiments, the one or more T cell costimulatory molecules include CD28 ligands (e.g., CD80 and CD86); antibodies that bind to CD28 such as CD28.2, the anti-CD28 antibody included in DYNABEADS Human T-Activator CD3/CD28 (Thermo Fisher) and anti-CD28 domains disclosed in US2020/0199234, US2020/0223925, US2020/0181260, US2020/0239576, US2020/0199233, US2019/0389951, US2020/0299388, US2020/0399369, and US2020/0140552; CD137 ligand (CD137L); anti-CD137 antibodies such as urelumab and utomilumab; ICOS ligand (ICOS-L); and anti-ICOS antibodies such as feladilimab, vopratelimab, and the anti-ICOS domain of izuralimab.

[0454] In some embodiments, the one or more T cell activating cytokines include IL-2, IL-7, IL-15, IL-21, interferons (e.g., interferon-gamma), and functional variants and modified versions thereof.

[0455] Lymhpodepletion may be induced by various treatments that destroy lymphocytes and T cells in the subject. For example, the lymphodepletion may include myeloablative chemotherapies, such as fludarabine, cyclophosphamide, bendamustine, and combinations thereof. Lymphodepletion may also be induced by irradiation (e.g., full-body irradiation) of the subject.

[0456] In some embodiments, the source of targeted lipid particles is the same subject that is administered a targeted lipid particle composition. In other embodiments, they are different. In some embodiments, the source of targeted lipid particles and recipient tissue is autologous (from the same subject) or heterologous (from different subjects). In some embodiments, the donor tissue for targeted lipid particle compositions described herein is a different tissue type than the recipient tissue. In some embodiments, the donor tissue is muscular tissue and the recipient tissue is connective tissue (e.g., adipose tissue). In other embodiments, the donor tissue and recipient tissue are of the same or different type, but from different organ systems.

[0457] In some embodiments, the targeted lipid particles (e.g, viral vector) composition described herein are administered to a subject having a cancer, an autoimmune disease, an infectious disease, a metabolic disease, a neurodegenerative disease, or a genetic disease (e.g., enzyme deficiency). In some embodiments, the subject is in need of regeneration.

[0458] In some embodiments, the cancer is a T cell-mediated cancer. In another embodiment, the antigen binding moiety portion of a CAR is designed to treat a particular cancer. In some embodiments, the targeted lipid particle is used to treat cancers and disorders including but not limited to non-Hodgkin lymphoma (NHL), acute lymphocytic leukemia (ALL), chronic lymphocytic leukemia (CLL), multiple myeloma, and the like. In some embodiments, the targeted lipid particle is used to treat B cell malignancies, e.g., refractory B cell malignancies.

[0459] In some embodiments, the targeted lipid particle is co-administered with an inhibitor of a protein that inhibits membrane fusion. For example, Suppressyn is a human protein that inhibits cell-cell fusion (Sugimoto et al., “A novel human endogenous retroviral protein inhibits cell-cell fusion” Scientific Reports 3:1462 DOI: 10.1038/srep01462). In some embodiments, the targeted lipid particle is co-administered with an inhibitor of sypressyn, e.g., a siRNA or inhibitory antibody.

### EXAMPLES

[0460] The present disclosure may be further described by the following non-limiting examples, in which standard techniques known to the skilled artisan and techniques analogous to those described in these examples may be used where appropriate. It is understood that the skilled artisan will envision additional embodiments consistent with the disclosure provided herein.

### Example 1 Characterization of CD4 Binders

[0461] Binders were selected that demonstrated detectable CD4 binding in solution. To assay the ability of the binders to direct cell-specific transduction, the binders were used to generate binder (e.g., as scFv)-Nipah G glycoprotein fusions as described in WO2017182585 for pseudotyping of lentiviral vectors. The Nipah G-linker-binder construct was codon optimized for expression in human cells and sub-cloned into an expression vector for lentivirus generation.

[0462] Crude lentiviral production was performed as follows: HEK-293LX cells were plated 24 hours in advance of transfection. On the day of transfection, HEK-293LX cells were transfected with a lentiviral packaging plasmid, the lentiviral transfer plasmid encoding GFP (pSFFV-GFP), and the plasmids encoding for Nipah G protein retargeted for CD4 receptor targeting (NIV-G (CD4)) and Nipah F fusion protein (NiV-Fd22). To harvest the lentivirus, supernatant was removed from the HEK293LX cells and spun at 1000×g for 5 minutes. The supernatant was removed and immediately added to CD4-positive target cells or T cells, or frozen at −80° C. for later use. Lentiviral vectors were produced in both adherent cells and in suspension. In certain experiments, the vectors were filtered using a 0.45 μm filter and concentrated by ultracentrifugation.

[0463] To estimate activity of the CD4-retargeted vectors, the supernatants were diluted 1:5 and used to transduce SupT1 cells. After 5 days, the transduced cells were assayed for GFP expression by flow cytometry. The percentage of live cells expressing GFP is shown in Table 17, column “Single point SupT1”. Titer of certain CD4-retargeted vectors was determined by multi-point dilution of vector for transduction of SupT1 cells (adherent and suspension production) (Table 17, columns “Multiple point SupT1 Adh.” and “Multiple point SupT1 Susp.”). Titer was similarly determined using HEK-293T cells overexpressing Macaca nemestrina CD4 to estimate cross-reactivity of the vectors (Table 17, column “Multiple point 293oeNemestrinaCD4”).

TABLE 17

| | | | Multiple point | Multiple point |
|---|---|---|---|---|
| | Single point | Multiple point SupT1 | SupT1 Susp. | 293oeNemestri- |
| | SupT1 1:5 dilution | Adh. titer | titer | naCD4 Adh. titer |
| Binder | GFP (% GFP) | [Log(TU/mL)] | [Log(TU/mL)] | [Log(TU/mL)] |
| 265 | 24.1 ± 10.8 | 5.8 ± 0.25 | | |
| 266 | 13.1 ± 1.6 | 5.51 ± 0.05 | | |
| 267 | 10.1 ± 5.8 | 5.27 ± 0.25 | 4.7 | |
| 263 | 4.5 ± 7 | | | |
| 268 | 34.7 ± 7.8 | 6.1 ± 0.09 | 5.65 ± 0.57 | |
| 270 | 56.5 ± 12.1 | 6.53 ± 0.3 | 5.32 ± 0.23 | |
| 271 | 52.9 ± 11.8 | 6.51 ± 0.21 | 5.38 ± 0.28 | |
| 273 | 44 ± 12.2 | 6.29 ± 0.26 | 5.7 ± 0.51 | 5.31 ± 0.76 |
| 274 | 23 ± 18 | 5.8 ± 0.36 | 5.61 ± 0.13 | |
| 275 | 53.9 ± 3.2 | 6.46 ± 0.24 | 5.45 ± 0.14 | |
| 276 | 9.4 ± 0.1 | 5.35 ± 0.05 | | |
| 277 | 4.2 ± 1.5 | 5.10 | | |
| 278 | 36.6 ± 5 | 6.12 ± 0.04 | 5.3 | |
| 279 | 37.5 ± 34.8 | 6.13 ± 0.67 | 5.71 ± 0.19 | |
| 264 | 11.3 ± 0 | | | |
| 257 | 47.3 ± 1.1 | 6.1 ± 0.15 | | |
| 280 | 25.9 ± 2.1 | 6 ± 0.04 | 5.34 ± 0.12 | |
| 282 | 12.8 ± 1.1 | 5.51 ± 0.05 | 5.19 ± 0.12 | |
| 283 | 41.1 ± 8.2 | 6.26 ± 0.11 | 5.24 ± 0.09 | |
| 284 | 17.9 ± 2.3 | 5.65 ± 0.07 | | |
| 285 | 5.9 ± 1.8 | 5.24 | | |
| 286 | 59.3 ± 25.7 | 6.23 ± 0.39 | 5.46 ± 0.03 | 6.81 ± 0.06 |
| 258 | 49.6 ± 0.8 | 6.1 ± 0.17 | | |
| 287 | 38.8 ± 22.8 | 5.96 ± 0.49 | 5.28 ± 0.2 | |
| 288 | 5.3 ± 0.5 | 5.18 | | |
| 289 | 9.8 ± 2.8 | 5.39 ± 0.12 | | |
| 290 | 27.7 ± 14.5 | 5.91 ± 0.4 | 5.36 ± 0.19 | |
| 291 | 0.6 ± 0.5 | | | |
| 260 | 0.2 ± 0 | | | |
| 292 | 21.8 ± 8.3 | 5.9 ± 0.3 | 5.63 ± 0.29 | 6.59 ± 0.03 |
| 293 | 3.9 ± 0.3 | | | |
| 294 | 11.6 ± 2.3 | 5.45 ± 0.08 | | |
| 295 | 11.3 ± 8.9 | 5.74 ± 0.28 | 5.2 ± 0.19 | |
| 296 | 5.8 ± 2.4 | 5.10 | | |
| 261 | 3.1 ± 0 | | | |
| 297 | 31.8 ± 4.4 | 5.89 ± 0.26 | 5.34 ± 0.14 | |
| 298 | 19.9 ± 0.3 | 5.79 ± 0.12 | | |
| 300 | 16.3 ± 4.1 | 5.59 ± 0.12 | | |
| 301 | 28.2 ± 8.7 | 5.93 ± 0.21 | 5.34 ± 0.2 | |
| 302 | 0.2 ± 0.2 | | | |
| 304 | 20.7 ± 9.9 | 5.74 ± 0.28 | 5.15 ± 0.11 | |
| 305 | 30.7 ± 9.9 | 6.01 ± 0.15 | 5.26 ± 0.26 | |
| 306 | 0.3 ± 0 | | | |
| 307 | 4.7 ± 2 | 5.24 | | |
| 314 | 25 ± 4.5 | 5.89 ± 0.12 | 5.43 ± 0.21 | |
| 315 | 21.3 ± 5.9 | 5.79 ± 0.14 | 5.61 ± 0.37 | |
| 316 | 0.2 ± 0.1 | | | |
| 317 | 12.5 ± 4.4 | 5.41 ± 0.15 | 4.85 | |
| 319 | 35.4 ± 17.2 | 6.16 ± 0.11 | 5.31 ± 0.18 | |
| 320 | 14 ± 7.4 | 5.44 ± 0.3 | 5.08 ± 0.21 | |
| 322 | 59.7 ± 10.3 | 6.44 ± 0.2 | 5.57 ± 0.26 | |
| 323 | 20.5 ± 4.5 | 5.77 ± 0.13 | | |
| 324 | 14.2 ± 6.9 | 5.41 ± 0.18 | 5.02 ± 0.42 | 4.62 |
| 325 | 21.4 ± 5.1 | 5.82 ± 0.17 | 5.44 ± 0.14 | |
| 326 | 43.7 ± 7.7 | 6.25 ± 0.15 | 5.54 ± 0.25 | |
| 327 | 0.3 ± 0 | | | |
| 262 | 0 ± 0 | | | |
| 328 | 23.5 ± 9.1 | 5.76 ± 0.16 | 5.49 ± 0.28 | |
| 329 | 10.5 ± 2.4 | 5.34 ± 0.15 | 4.92 ± 0.11 | |
| 330 | 14.1 ± 0.8 | 5.56 ± 0.02 | 5.17 ± 0.1 | |
| 331 | 24.6± 1.2 | 5.92 ± 0.04 | 5.21 ± 0.06 | |
| 333 | 22.9 ± 13.6 | 5.89 ± 0.26 | 4.85 | 5.78 ± 1 |
| 334 | 5.5 ± 2.1 | 5.24 | | 5.25 ± 0.1 |
| 335 | 17.6 ± 2.3 | 5.64 ± 0.05 | 5.21 ± 0.12 | |
| 336 | 0.1 ± 0.1 | | | |
| 337 | 27.4 ± 6.5 | 6.01 ± 0.11 | 5.25 ± 0.07 | |
| 339 | 23.1 ± 5.2 | 5.8 ± 0.13 | 5.09 ± 0.09 | |
| 340 | 13 ± 2.2 | 5.43 ± 0.15 | 5.15 ± 0.08 | |
| 109 | 17.7 ± 3.5 | 5.66 ± 0.12 | 5.17 ± 0.1 | |
| 110 | 0.4 ± 0.1 | | | |
| 111 | 57.3 ± 5.4 | 6.41 ± 0.1 | 5.62 ± 0.11 | |
| 112 | 7.6 ± 1.4 | 5.28 ± 0.07 | 5.18 | 5.37 ± 0.02 |
| 1 | 79.2 ± 6 | 6.25 ± 0.5 | 5.84 ± 0.13 | |
| 113 | 45 ± 32.1 | 6.54 ± 0.26 | 5.68 ± 0.23 | 4.68 ± 0.08 |
| 114 | 65.2 ± 9.8 | 6.6 ± 0.11 | 5.6 ± 0.08 | |
| 115 | 27.8 ± 5.9 | 5.91 ± 0.14 | 5.44 ± 0.06 | |
| 23 | 59.9 ± 7 | 6.51 ± 0.12 | 5.69 ± 0.26 | |
| 116 | 51.6 ± 9.4 | 6.4 ± 0.17 | 5.51 ± 0.05 | |
| 117 | 54.1 ± 14 | 6.45 ± 0.26 | 5.66 ± 0.25 | 5.41 |
| 2 | 32.1 ± 3 | 6.04 ± 0.03 | 5.61 ± 0.09 | |
| 118 | 61.2 ± 2.3 | 6.57 ± 0 | 5.6 | |
| 119 | 55.4 ± 13.1 | 6.38 ± 0.23 | 5.74 ± 0.3 | 4.73 |
| 120 | 42.3 ± 8.6 | 6.21 ± 0.06 | 5.46 ± 0.03 | |
| 121 | 0.6 ± 0.6 | | | |
| 122 | 67.1 ± 10.1 | 6.72 ± 0.07 | 5.54 | |
| 123 | 56.9 ± 2.6 | 6.57 ± 0 | 5.65 ± 0.13 | |
| 38 | 59.9 ± 14.6 | 6.51 ± 0.26 | 5.88 ± 0.31 | 4.86 ± 0.28 |
| 39 | 53.1 ± 23.1 | 6.36 ± 0.24 | 5.67 ± 0.41 | 5.96 ± 0.76 |
| 40 | 61.8 ± 11.3 | 6.43 ± 0.21 | 5.88 ± 0.3 | 5.39 ± 0.71 |
| 41 | 64.9 ± 7.6 | 6.52 ± 0.24 | 5.8 ± 0.4 | 5.42 ± 0.78 |
| 42 | 61.8 ± 10.1 | 6.49 ± 0.18 | 5.95 ± 0.4 | 5.39 ± 0.69 |
| 43 | 45.2 ± 10.2 | 6.21 ± 0.1 | 5.48 ± 0.2 | 4.68 |
| 44 | 58.3 ± 8.5 | 6.44 ± 0.2 | 5.65 ± 0.21 | 4.81 ± 0.11 |
| 45 | 8.2 ± 1.3 | 5.25 ± 0.08 | 5.19 ± 0.27 | 4.68 |
| 46 | 71.7 ± 11.7 | 6.56 ± 0.24 | 5.78 ± 0.18 | 5.86 ± 0.9 |
| 47 | 77.9 ± 11.1 | 6.6 ± 0.21 | 5.77 ± 0.21 | 5.44 ± 0.92 |
| 48 | 80.7 ± 9.1 | 6.57 ± 0.47 | 5.8 ± 0.22 | 5.53 ± 0.78 |
| 49 | 52.4 ± 13.3 | 6.36 ± 0.24 | 5.59 ± 0.27 | 4.87 ± 0.07 |
| 50 | 77.5 ± 8.8 | 6.68 ± 0.22 | 5.76 ± 0.23 | 5.26 ± 0.96 |
| 51 | 59.4 ± 18.2 | 6.51 ± 0.3 | 5.74 ± 0.25 | 4.6 ± 0.18 |
| 52 | 59 ± 10.7 | 6.39 ± 0.19 | 5.57 ± 0.22 | 5.56 ± 1.02 |
| 54 | 65.3 ± 9.5 | 6.53 ± 0.24 | 5.7 ± 0.27 | 5.2 ± 0.93 |
| 55 | 42.6 ± 2.8 | 5.94 ± 0.24 | | 5.95 ± 0.2 |
| 56 | 71.8 ± 3.7 | 6.5 ± 0.15 | | |
| 3 | 1.2 ± 0.1 | | | |
| 4 | 1 ± 0 | | | |
| 6 | 1.1 ± 0.1 | | | |
| 7 | 1.2 ± 0.4 | | | |
| 8 | 1 ± 0.2 | | | |
| 10 | 0 ± 0 | | | |
| 11 | 1.2 ± 0.2 | | | |
| 12 | 1.3 ± 0.2 | | | |
| 13 | 0.1 ± 0 | | | |
| 57 | 15.5 ± 8.2 | 5.49 ± 0.21 | 5.09 ± 0.13 | 5.17 ± 0.21 |
| 125 | 5 ± 2.3 | 5.24 | | |
| 129 | 0.2 ± 0 | | | |
| 130 | 0.2 ± 0.1 | | | |
| 131 | 0.1 ± 0 | | | |
| 132 | 0.1 ± 0.1 | | | |
| 134 | 0.2 ± 0.1 | | | |
| 64 | 0.1 ± 0.1 | | | |
| 65 | 0 ± 0 | | | |
| 135 | 11.4 ± 4.8 | 5.35 ± 0.2 | 5.19 ± 0.07 | 4.56 |
| 136 | 14.3 ± 5.2 | 5.45 ± 0.2 | 5.31 ± 0.12 | 4.62 |
| 137 | 24.7 ± 4.2 | 5.94 ± 0.06 | 5.57 ± 0.24 | 4.56 |
| 138 | 17.4 ± 2.1 | 5.69 ± 0.1 | | 5.44 ± 0.02 |
| 15 | 38.2 ± 8.6 | 6.1 ± 0.15 | 5.4 ± 0.2 | 5.56 ± 0.83 |
| 66 | 9.1 ± 2.3 | 5.28 ± 0.12 | 5.06 ± 0.23 | |
| 67 | 23.9 ± 4.8 | 5.91 ± 0.11 | 5.22 ± 0.32 | 4.68 |
| 68 | 25.5 ± 1.2 | 5.94 ± 0 | 5.36 ± 0.16 | 4.68 |
| 69 | 19.7 ± 4.2 | 5.75 ± 0.17 | 5.13 ± 0.16 | 4.52 ± 0.06 |
| 24 | 0.2 ± 0 | | | |
| 139 | 0.1 ± 0.1 | | | |
| 140 | 0 ± 0 | | | |
| 141 | 10.2 ± 5 | 5.29 ± 0.23 | 5 ± 0.1 | 4.56 |
| 142 | 4.6 ± 1.3 | 5.18 | | 5.29 ± 0.05 |
| 70 | 9.9 ± 2.9 | 5.38 ± 0.13 | 5.3 ± 0.08 | 5.37 ± 0.02 |
| 25 | 0.1 ± 0 | | | |
| 144 | 0.1 ± 0.1 | | | |
| 145 | 0 ± 0 | | | |
| 146 | 56.1 ± 8.2 | 6.43 ± 0.13 | 5.76 ± 0.07 | |
| 147 | 8.7 ± 0.8 | 5.33 ± 0.04 | | |
| 148 | 53.3 ± 14.3 | 6.35 ± 0.2 | 5.91 ± 0.23 | 4.83 ± 0.14 |
| 71 | 62.1 ± 9.5 | 6.39 ± 0.21 | 6.04 ± 0.4 | 5.22 ± 0.54 |
| 72 | 25.5 ± 0.3 | 5.84 ± 0.06 | 5.24 | |
| 73 | 55.4 ± 23.3 | 6.41 ± 0.24 | 6.13 ± 0.28 | 5.83 ± 0.55 |
| 74 | 58.5 ± 25.4 | 6.53 ± 0.23 | 5.99 ± 0.32 | 5.76 ± 0.55 |
| 75 | 56.3 ± 28.5 | 6.38 ± 0.38 | 6.18 ± 0.33 | 5.49 ± 0.6 |
| 149 | 0.5 ± 0.3 | | | 5.13 |
| 150 | 0.1 ± 0.1 | | | |
| 26 | 1.2 ± 0.1 | | | 5.24 ± 0.03 |
| 77 | 3.8 ± 2.4 | 4.96 ± 0.17 | 4.63 ± 0.04 | 5.34 ± 0.08 |
| 151 | 0.1 ± 0 | | | |
| 152 | 0.2 ± 0.1 | | | |
| 153 | 0.1 ± 0.1 | | | |
| 154 | 5 ± 0.5 | 5.10 | | |
| 155 | 2.7 ± 0.4 | | | |
| 156 | 10.3 ± 1.8 | 5.41 ± 0.09 | | 4.95 ± 0.1 |
| 80 | 6.1 ± 1.3 | 5.14 ± 0.09 | 5.24 ± 0.12 | |
| 82 | 15 ± 2 | 5.57 ± 0.04 | 5.34 ± 0.14 | |
| 17 | 0.1 ± 0.1 | | | |
| 157 | 0.1 ± 0 | | | |
| 27 | 0.1 ± 0 | | | |
| 158 | 0 ± 0 | | | |
| 159 | 10.9 ± 1.7 | 5.44 ± 0.06 | | |
| 83 | 20.2 ± 7 | 5.75 ± 0.19 | 5.25 ± 0.1 | 4.62 |
| 160 | 0.1 ± 0 | | | |
| 28 | 1.3 ± 0.4 | | | 4.99 ± 0.05 |
| 29 | 0.4 ± 0.1 | | | |
| 161 | 0 ± 0 | | | |
| 162 | 0 ± 0 | | | |
| 18 | 11.7 ± 4.8 | 5.41 ± 0.17 | 5.13 ± 0.06 | |
| 85 | 23.1 ± 1.7 | 5.85 ± 0.05 | 5.05 ± 0.18 | |
| 164 | 1 ± 0.1 | | | |
| 165 | 1.3 ± 0.6 | | | |
| 87 | 0 ± 0 | | | |
| 32 | 0.8 ± 0.4 | | | |
| 166 | 17.1 ± 0.5 | 5.75 ± 0.14 | | |
| 88 | 36.3 ± 11.5 | 6.15 ± 0.21 | 5.37 ± 0.16 | 5.16 ± 0.19 |
| 168 | 37.6 ± 13.2 | 5.99 ± 0.28 | 5.51 ± 0.11 | 5.42 ± 0.9 |
| 89 | 48.3 ± 16.1 | 6.19 ± 0.28 | 5.49 ± 0.22 | 5.52 ± 1.01 |
| 19 | 0.1 ± 0 | | | |
| 91 | 0 ± 0 | | | |
| 92 | 0 ± 0 | | | |
| 93 | 41.1 ± 12.7 | 6.12 ± 0.19 | 5.88 | 6.36 ± 0.28 |
| 176 | 0.4 ± 0.3 | | | |
| 177 | 0.4 ± 0.1 | | | |
| 178 | 0 ± 0 | | | |
| 33 | 0.1 ± 0.1 | | | |
| 179 | 0.1 ± 0.1 | | | |
| 34 | 0.1 ± 0.1 | | | |
| 180 | 14.6 ± 4 | 5.55 ± 0.11 | | |
| 95 | 39.2 ± 20.5 | 6 ± 0.22 | 4.77 ± 0.1 | 5.79 ± 1.02 |
| 181 | 0 ± 0 | | | |
| 182 | 19.4 ± 3.6 | 5.76 ± 0.14 | 5.24 ± 0.08 | 5.02 ± 0.65 |
| 97 | 36.1 ± 14.4 | 6.06 ± 0.26 | 5.13 ± 0.09 | 5.99 |
| 99 | 5.1 ± 0.1 | 4.91 ± 0.15 | 4.78 | |
| 100 | 6.5 ± 0.8 | 5.03 ± 0.17 | 5.03 ± 0.17 | |
| 36 | 11.8 ± 3.4 | 5.47 ± 0.12 | 5.13 ± 0.1 | 4.94 ± 0.31 |
| 101 | 35.7 ± 10.9 | 6.07 ± 0.2 | 5.31 ± 0.16 | 5.35 ± 0.64 |
| 185 | 8 ± 2.5 | 5.22 ± 0.19 | 5.32 ± 0.13 | |
| 103 | 32 ± 8.1 | 6.04 ± 0.14 | 5.35 ± 0.17 | |
| 192 | 15.4 ± 7.7 | 5.49 ± 0.26 | 5.17 ± 0.1 | 4.88 ± 0.46 |
| 193 | 0.1 ± 0.1 | | | |
| 195 | 14.1 ± 7.2 | 5.42 ± 0.28 | 5.17 ± 0.08 | |
| 104 | 31.4 ± 10.6 | 6 ± 0.23 | 5.24 ± 0.09 | 5.56 ± 1.2 |
| 37 | 0 ± 0 | | | |
| 198 | 0 ± 0 | | | |
| 200 | 0 ± 0.1 | | | |
| 201 | 0 ± 0 | | | |
| 202 | 0 ± 0 | | | |
| 203 | 66.1 ± 13.8 | 6.67 ± 0.23 | 5.7 ± 0.26 | 5.6 ± 0.98 |
| 204 | 0 ± 0 | | | |
| 206 | 0.4 ± 0.1 | | | |
| 208 | 0 ± 0 | | | |
| 210 | 0 ± 0 | | | |
| 211 | 16.4 ± 8 | 5.6 ± 0.31 | | 6.61 ± 0.06 |
| 213 | 9 ± 0.2 | 5.35 ± 0 | | |
| 216 | 24.1 ± 14.8 | 5.7 ± 0.45 | 4.95 ± 0.21 | 5.66 ± 1.28 |
| 217 | 0 ± 0 | | | |
| 218 | 0.1 ± 0.1 | | | |
| 219 | 0±0 | | | |
| 220 | 0 ± 0 | | | |
| 22 | 0 ± 0 | | | |
| 341 | 0 ± 0 | | | |
| 342 | 0.4 ± 0 | | | |
| 343 | 22 ± 3.1 | 5.86 ± 0.15 | | |
| 344 | 11 ± 2.8 | 5.43 ± 0.11 | | 5.35 |
| 345 | 38.5 ± 4.3 | 6.06 ± 0.27 | | 6.45 ± 0.04 |
| 346 | 1 ± 0.2 | | | |
| 347 | 0 ± 0 | | | |
| 348 | 21.6 ± 2.4 | 5.9 ± 0.18 | | |
| 349 | 0 ± 0 | | | |
| 350 | 41.2 ± 13.6 | 6.13 ± 0.34 | 5.1 | |
| 351 | 33.3 ± 10 | 5.89 ± 0.49 | 5.3 ± 0.08 | 6.02 ± 0.09 |
| 352 | 3.1 ± 0 | | | |
| 353 | 20.7 ± 0.5 | 5.84 ± 0.06 | | |
| 354 | 0.6 ± 0.1 | | | |
| 355 | 18.3 ± 3.1 | 5.74 ± 0.19 | | |
| 356 | 2.4 ± 0.4 | | | |
| 357 | 0.9 ± 0.1 | | | 5.41 |
| 358 | 39.6 ± 15 | 6.19 ± 0.17 | 5.1 | |
| 359 | 0.9 ± 0.1 | | | |
| 360 | 0.2 ± 0.1 | | | |
| 361 | 12.7 ± 2 | 5.49 ± 0.07 | | |
| 362 | 8.6 ± 1.3 | 5.35 ± 0.07 | | |
| 363 | 13.3 ± 3 | 5.51 ± 0.1 | | |
| 364 | 60.5 ± 12.3 | 6.44 ± 0.36 | 5.8 | 5.75 ± 0.69 |
| 259 | 54.9 ± 6.8 | 6.24 ± 0.13 | | 5.97 ± 0.12 |
| 365 | 2.4 ± 0.3 | | | |
| 366 | 20.5 ± 2 | 5.83 ± 0.14 | | |
| 367 | 51.8 ± 16.3 | 6.54 ± 0.19 | 5.49 ± 0.07 | |
| 368 | 7 ± 0.4 | 5.24 ± 0 | | |
| 369 | 37.7 ± 18.8 | 6.13 ± 0.25 | 5.33 ± 0.04 | 6.59 ± 0.24 |
| 370 | 11 ± 1 | 5.44 ± 0.06 | | |
| 371 | 5.9 ± 0.8 | 5.14 ± 0.06 | | 5.4 ± 0.07 |
| 372 | 2.5 ± 0.7 | | | |
| 373 | 0.1 ± 0.1 | | | |
| 374 | 24 ± 4.2 | 6.02 ± 0.11 | | |
| 375 | 24.6 ± 0.5 | 6.03 ± 0.04 | | |
| 376 | 8.8 ± 1.1 | 5.35 ± 0.07 | | |
| 377 | 0.7 ± 0.1 | | | |
| 378 | 21 ± 0.2 | 5.88 ± 0 | 5.18 | |
| 379 | 45.9 ± 12.1 | 6.23 ± 0.24 | 5.64 ± 0.02 | |
| 380 | 6.7 ± 0.7 | 5.21 ± 0.05 | | |
| 381 | 1.4 ± 0.7 | | | |
| 382 | 49 ± 0.2 | 6.2 ± 0.16 | 5.1 | 6.67 ± 0.07 |
| 383 | 11.3 ± 0.9 | 5.46 ± 0.03 | | |
| 384 | 51.2 ± 1.1 | 6.23 ± 0.18 | 5.24 | |
| 385 | 17.6 ± 8.9 | 5.62 ± 0.26 | | 6.57 |
| 386 | 45.1 ± 13.3 | 6.25 ± 0.15 | 5.24 ± 0.09 | 6.24 ± 0.09 |
| 223 | 2.4 ± 0.4 | | | |
| 224 | | | | 6.45 ± 0.04 |
| 106 | 0.9 ± 0.1 | | | 6.45 ± 0.04 |
| 225 | 1.5 ± 0.1 | | | |
| 226 | 0.1 ± 0 | | | |
| 228 | 15.5 ± 1.1 | 5.39 ± 0.16 | | 6.21 ± 0.1 |
| 229 | 0.6 ± 0.4 | | | |
| 107 | 0.1 ± 0.1 | | | |
| 238 | 0±0 | | | |
| 239 | 0 ± 0 | | | |
| 240 | 0.1 ± 0 | | | |
| 241 | 41.1 ± 2.1 | 5.77 ± 0.24 | | 5.99 ± 0.11 |
| 243 | 1.7 ± 0.6 | | | |
| 256 | 60.5 ± 11.3 | 6.31 ± 0.4 | 6.37 ± 1.18 | 5.91 ± 1.33 |

[0464] Titer was also determined on SupT1 cells following concentration of the viral vector compositions (Table 26).

TABLE 26

| | | | | | | SupT1 titer |
|---|---|---|---|---|---|---|
| | | | | SupT1 titer | SupT1 titer | (concentrated, |
| | | CD4 | Nemestrina | (crude, | (crude, | suspension, |
| | | domain | Cross- | adherent, | suspension, | PE) TU/mL |
| Binder | Modality | specificity | Reactivity | PE) TU/mL | PE) TU/mL | [conc factor]* |
| 387 | DARPin | Domain 1 | Cross- | 6.50E6 ± | 2.33E6* | 1.2E8 |
| | | | reactive | 1.47E6 | | [200X] |
| 256 | VHH | Domain 2 | Cross- | 4.73E6 ± | 2.34E6* | 5.22E7 |
| (VHH4)* | | | reactive | 2.79E6 | | [200X] |
| 388* | VHH | Domain 3/4* | Cross- | 1.18E ± | Too low* | 5.45E6 |
| | | | reactive | 1.26E6 | | [200] |
| 279 | scFv | Domain 3/4 | No cross- | 2.85E6 ± | 5.50E5 ± | 1.43E8 |
| | | | reactivity | 3.35E6 | 2.46E5 | [200X] |
| 286 | scFv | Domain 3/4 | Cross- | 2.27E6 ± | 2.88E5 ± | 5.47E7 |
| | | | reactive | 1.78E6 | 1.77E4 | [200X] |
| 287 | scFv | Domain 2 | No cross- | 1.73E6 ± | 1.94E5 ± | 3.83E7 |
| | | | reactivity | 1.29E6 | 8.40E4 | [200X] |
| 322 | scFv | Domain 3/4 | No cross- | 3.03E6 ± | 4.40E5 ± | 4.66E7 |
| | | | reactivity | 1.42E6 | 3.25E5 | [200X] |
| 47 | scFv | Domain 1/2 | Cross- | 4.39E6 ± | 6.47E5 ± | 6.86E7 |
| | | | reactive | 1.98E6 | 3.21E5 | [200X] |
| 48 | scFv | Domain 1/2 | Cross- | 5.91E6 ± | 6.93E5 ± | 8.75E7 |
| | | | reactive | 4.47E6 | 3.22E5 | [200X] |
| 75 | scFv | Domain 2 | Cross- | 3.80E6 ± | 1.44E6 | 1.36E8 |
| | | | reactive | 1.75E6 | | [200X] |
| 364 | scFv | Domain 2 | Cross- | 3.41E6 ± | 7.42E5 | 5.67E7 |
| | | | reactive | 1.70E6 | | [200X] |

[0465] Off-target transduction directed by certain binders was determined using CD4 knockout SupT1 cells and HEK-293T cells, which were determined to be negative for CD4 expression. CD4-retargeted vectors expressing GFP were produced in either adherent or suspension culture, as described above, and used to transduce CD4 knockout SupT1 cells and HEK-293T cells at a single dilution. The percentage of GFP-expressing cells was determined by flow cytometry (FIG. 2).

[0466] Transduction efficiency on human PBMCs and Pan T cells was also determined for CD4-targeted lentiviral vectors. Concentrated vector was produced as described above and used to transduce human PBMCs from 3 donors, and the transduced cells were assayed for GFP expression by flow cytometry five days after transduction. The flow cytometry results are presented in FIG. 3. The percent of live cells that were GFP+ are shown in FIG. 4 The vectors showed a strong specificity for CD4+ cells vs. CD4− cells.

[0467] Binding kinetics of certain CD4 binders were assayed using biolayer interferometry (BLI). The CD4 binders were expressed as homodimers with mouse Fc. Human CD4-Fc was used as the capture reagent. Kinetic parameters are shown in Table 18 below.

TABLE 18

| Binder | Conc [nM] | K_{D} [nM] | Kₒₙ [1/Ms] | K_{off} [1/s] |
|---|---|---|---|---|
| 387 | 250 | 7 | 2.47E+04 | 1.75E−05 |
| 256 | 500 | 5.14 | 8.95E+04 | 4.60E−04 |
| 279 | 125 | 5 | 4.17E+04 | 2.10E−04 |
| 286 | 125 | 13.8 | 7.19E+02 | 2.70E−04 |
| 322 | 62.5 | 1.7 | 9.94E+04 | 1.75E−04 |
| 47 | 62.5 | 0.3 | 4.79E+05 | 5.70E−05 |
| 75 | 62.5 | 0.7 | 3.12E+05 | 2.05E−04 |
| 364 | 62.5 | 7.54 | 3.04E+04 | 2.30E−06 |

### Example 2. Transduction of Resting T Helper Cells Using a CD4 Targeted Fusogen to Generate CAR T Cells

[0468] A CD19-specific CAR encoding 4-1BB and the CD3zeta endodomains (CD 19 CAR) was generated to examine CD4+ CAR T transduction efficiency and functionality. PBMCs were thawed and activated with anti-CD3/anti-CD28 beads and exposed to GFP-expressing CD4 fusosomes (Binder 256), and specificity of targeting CD4+ T cells was measured by flow cytometry.

[0469] CD19 CAR fusosomes targeting CD4 were used to test transduction efficiency against activated (CD3/CD28 or IL-7 treated) or resting CD4+ T cells, and to measure T cell function against CD19+ and CD19 CRISPR/Cas9-knockout lymphoma cells (Nalm-6) (e.g., tumor co-culture and rechallenge assays and cytokine production) in vitro. Vector copy number (VCN) was determined by a multiplex digital droplet polymerase chain reaction (ddPCR) assay and reported as copies per diploid genome (c/dg). CD4-targeted CD 19 CAR fusosomes could efficiently transduce both activated (34%+1.5% CD4+ CAR+; 0.54±0.18 c/dg), and resting CD4-selected T cells, albeit at a lower expression and integration level (20%±0.5% CD4+ CAR+; 0.28±0.14 c/dg). Resting CD4-transduced CART cells demonstrated specific cytotoxicity and cytokine production (GM-CSF, IFN-γ, TNF-α, IL-2, IL-6, and IL-10) against CD19+ Nalm-6 cells, but did not recognize CD19 knockout tumor cells. In long-term co-culture assays (9-day) with repetitive stimulation with fresh tumor cells (3×), CD4+CD 19 CAR T cells transduced without prior activation continued to show potent tumor cell killing.

[0470] CD4-specific fusosomes encoding LVV were observed to efficiently deliver an integrating CAR payload to resting and activated CD4+ T cells. Modified CD4+ CAR T cells demonstrated potent anti-tumor activity against CD19+ tumor cells. These data are consistent with a finding that targeting the CD4 co-receptor through in vivo delivery using a novel pseudotyped LVV can produce functional CAR T cells.

### Example 3. CD4-Targeted Fusosomes Reduce CD19+ Tumor Burden In Vivo

[0471] CD4-targeted CD19 CAR fusosomes (lentiviral vector) were generated substantially as described above and assessed for their ability to reduce tumor burden in vivo. The fusosomes were pseudotyped with Nipah virus fusogen retargeted with CD4 Binder 256, CD4 Binder 75, and a CD8 Binder Control. NSG mice (n=5/group) were injected with 1E6 Nalm6-Luc leukemia B cells via intravenous (IV) tail injection, followed three days later by an IV tail injection of 1E7 human peripheral blood mononuclear cells (hPBMC). A day after hPBMC injection, 2.5E6, 5E6, or 1E7 integrating units (IU) of CD4-targeted CD19 CAR fusosomes were injected into separate groups of mice via the same route and volume. Beginning 1 day following fusosome injection, Nalm6 tumor progression was tracked via bioluminescent imaging (BLI) weekly throughout the duration of the study. Tumor growth data is represented as total flux (photons/sec). In addition, peripheral blood was collected from all animals on study day 15 to assess the presence of CAR+ T− cells in peripheral blood using flow cytometry. The CD19 CAR contained an anti-scFv directed against CD19 and an intracellular signaling domain containing intracellular components of 4-1BB and CD3-zeta.

[0472] As shown in FIGS. 5A and 5B, dose dependent tumor control was observed with Binder 256 and CD8 Control Binder at Day 21. Binder 75 showed a reduced ability to control Nalm6 growth, as shown in FIG. 5C. As shown in FIG. 5D, expression of the CAR in CD4+ T cells was dose-dependent. These data indicate that in vivo delivery of a CD19 CAR transgene payload with CD4-targeted fusosomes in CD19+ tumor bearing mice demonstrates robust production of CAR T cells and CD19+ tumor eradication.

TABLE 19
Full Binder Sequences
Table 19-Full length sequences

| | Binder | SEQ ID |
|---|---|---|
| Sequence | Name | NO: |
| QVQLQQSGAELMKPGASVKISCKATGYTFSSYWIEWVKQRPGHGLEWIGEIFPGS | 1 | 1 |
| GHTSFNEKFKGKATFTADTSSNTAYIQLSSLTSEDSAVYYCARRGYGYDEGFDYWG | | |
| QGTTLTVSSGGGSGGGGSGGGGSDIKMTQSPSSMYASLGERVTITCKASQDINSY | | |
| LSWFQQKPGKSPKTLIYRANRLVDGVPSRFSGSGSGQDYSLTISSLEYEDMGIYYCL | | |
| QYDEFPPTFGAGTKLELK | | |
| QVQLQQSGAELMKPGASVKISCKATGYTLSSYWIEWVKQRPGHGLEWIGEILPGS | 2 | 2 |
| GSTSYNEKFKGKATFTADTSSSTAYMQLSSLTSEDSAVYYCARRGYGYDEGFDYW | | |
| GQGTTLTVSSGGGSGGGGSGGGGSDIKMTQSPSSMYASLGERVTITCKASQDINS | | |
| YLSWFQQKPGKSPKTLIYRANRLVDGVPSRFSGSGSGQDYSLTISSLEYEDMGIYYC | | |
| LQYDEFPPTFGAGTKLELK | | |
| LVKTGASVKISCKASGYSFTGYYMHWVKQSHGKSLEWIGYISSYNGATSYNQKFK | 3 | 3 |
| GKATFTVDTSSSTAYMQFNSLTSEDSAVYYCARGRYGEYFDYWGQGTTLTVSSGG | | |
| GSGGGGSGGGGSDIQMTQSPASLSVSVGETVTITCRASENIYSNLAWYQQKQGK | | |
| SPQLLVFAATYLADGVPSRFSGSGSGTQYSLKINSLQSEDFGNYYCQHFWGTPWT | | |
| FGGGTKLEIK | | |
| LVKTGASVKISCKASGYSFTGYYMHWVKQSHGKSLEWIGYISSYNGVTGYNQKFK | 4 | 4 |
| GKATFTVDTSSSTAYMQFNSLTSEDSAVYYCARGRYGDYFDYWGQGTTLTVSSGG | | |
| GSGGGGSGGGGSDIQMTQSPASLSVSVGETVTITCRASENIYSNLAWYQQKQGK | | |
| SPQLLVYAATNLADGVPSRFSGSGSGTQYSLKINSLQSEDFGSYYCQHFWGTPWT | | |
| FGGGTKLEIK | | |
| LVKTGASVKISCKASGYSFTGYYMHWVKQSHGKSLEWIGYISSYNGVTSYNQKFK | 5 | 5 |
| GKATFTVDTSSSTAYMHFNSLTSEDSAVYYCARGRYGDYFDYWGQGTTLTVSSGG | | |
| GSGGGGSGGGGSDIQMTQSPASLSVSVGETVTITCRASENIYSNLAWYQQKQGK | | |
| SPQVLVYAATNLADGVPSRFSGSGSGTQYSLKINSLQSEDFGSYYCQHFWGSPWT | | |
| FGGGTKLEIK | | |
| LVKTGASVKISCKASGYSFTGYYMHWVKQSHGKSLEWIGYISSYNGVTGYNQKFK | 6 | 6 |
| GKATFTVDTSSSTAYMQFNSLTSEDSAVYYCARGRYGDYFDYWGQGTTLTVSSGG | | |
| GSGGGGSGGGGSDIQMTQSPASLSVSVGETVTITCRASENIYSNLAWYQQKQGK | | |
| SPRLLVYAATNLADGVPSRFSGSGSGTQYSLKITSLQSEDFGSYYCQHFWGTPWTF | | |
| GGGTKLEIK | | |
| LVKTGASVKISCKASGYSFTGYYMHWVKQSHGKSLEWIGYISSYNGANGYNQKFK | 7 | 7 |
| GKATFTVDTSSSTAYMQFNSLTSEDSAVYYCARGRYGDYFDYWGQGTTLTVSSGG | | |
| GSGGGGSGGGGSDIQMTQSPASLSVSVGETVTITCRASENIYSNLAWYQQKQGK | | |
| SPQLLVYAATNLADGVPSRFSGSGSGTQYSLKINSLQSEDFGSYYCQHFWGTPWT | | |
| FGGGTKLEIK | | |
| LVKTGASVKISCKASGYSFTGYYMHWVKQSHGKSLEWIGYISSYNGVTGYNQKFK | 8 | 8 |
| GKATFTVDTSSSTAYMQFNSLTSEDSAVYYCARGRYGDYFDYWGQGTTLTVSSGG | | |
| GSGGGGSGGGGSDIQMTQSPASLSVSVGETVTITCRASENIYSNLAWYQQKQGK | | |
| SPQVLVYAATNVADGVPSRFSGSGSGTQYSLKINSLQSEDFGSYYCQHFWGTPWT | | |
| FGGGTKLEIK | | |
| LVKTGASVKISCKASGYSFTGYYMHWVKQSHGKSLEWIGYISSYNGVTGYNQKFK | 9 | 9 |
| GKATFTVDTSSSTAYMQFNSLTSEDSAVYYCARGRYGDYFDYWGQGTTLTVSSGG | | |
| GSGGGGSGGGGSDIQMTQSPASLSVSVGETVTITCRASDNIYSNLAWYQQKQGK | | |
| SPQLLVYAATNLADGVPSRFSGSGSGTQYSLKINSLQSEDFGSYYCQHFWGTPWT | | |
| FGGGTKLEIK | | |
| LVKTGASVKISCKASGYSFTGYYMHWVKQSHGKSLEWIGYISSYNGVTGYNQKFK | 10 | 10 |
| GKATFTVDTSSSTAYMQFNSLTSEDSAVYYCARGRYGDYFDYWGQGTTLTVSSGG | | |
| GSGGGGSGGGGSDIQMTQSPASLSVSVGETVTITCRASENIYSNLAWYQQKQGK | | |
| SPRLLVYAATNLADGVPSRFSGSGSGTQYSLKINSLQSEDFGSYYCQHFWGTPWTF | | |
| GGGTKLEIK | | |
| LVKTGASVKISCKASGYSFTGYYMHWVKQSHGKSLEWIGYISSYNGVTGYNQKFK | 11 | 11 |
| GKATFTVDTSSSTAYMQFNSLTSEDSAVYYCARGRYGDYFDYWGQGTTLAVSSG | | |
| GGSGGGGSGGGGSDIQMTQSPASLSVSVGETVTITCRASENIYSNLAWYQQKQG | | |
| KSPQLLVYAATNLADGVPSRFSGSGSGTQYSLKINSLQSEDFGSYYCQHFWGTPW | | |
| TFGGGTKLEIK | | |
| LVKTGASVKISCKASGYSFTGFYMHWVKQSHGKGLEWIGYISSYNGATGYNQKFK | 112 | 12 |
| GKATFTVDTSSSTAYMQFNSLTSEDSAVYYCARGRYGDYFDYWGQGTTLTVSSGG | | |
| GSGGGGSGGGGSDIQMTQSPASLSVSVGETVTITCRASENIYSNLAWYQQKQGK | | |
| SPQLLVFAATYLADGVPSRFSGSGSGTQYSLKINSLQSEDFGSYYCQHFWGTPWTF | | |
| GGGTKLEIK | | |
| LVKTGASVKISCKASGYSFTGYYMHWVKQSHGKSLEWIGYISSYNGATGYNQKFK | 13 | 13 |
| GKATFTVDTSSSTAYMQFNSLTSEDSAVYYCARGRYGDYFDYWGQGTTLTVSSGG | | |
| GSGGGGSGGGGSDIQMTQSPASLSVSVGETVTITCRASENIYSNLAWYQQKQGK | | |
| SPQLLVYAATNLADGVPSRFSGSGSGTQYSLKINSLQSEDFGSYYCQHFWGSPWT | | |
| FGGGTKLEIK | | |
| QVQLQQPGAELVKPGASVKLSCKASGYTFTSYWMHWVKQRPGQGLEWIGMIH | 14 | 14 |
| PNSGTTNYNEKFKSKATLTVDKSSSTAYMQLSSLTSEDSAVYYCARWGDGYSFAY | | |
| WGQGTLVTVSAGGGSGGGGSGGGGSQIVLTQSPAIMSASPGEKVTMTCSASSSV | | |
| SYMHWFQQKSGTSPKRWIYDTSKLASGVPARFSGSGSGTSYSLTFSSMEAEDAAT | | |
| YYCQQWSSNPLYTFGGGTKLEIK | | |
| QVQLKQSGPELVKPGASVKMSCKASGYTFTDYVINWVKQRTGQGLEWIGEIYPG | 15 | 15 |
| SGSSYYNEKFKGKATLTADKSSNTAYMQLSSLTSEDSAVYFCARRGERGPWFAYW | | |
| GQGTLVTVSAGGGSGGGGSGGGGSDIVLTQSPASLAVSLGQRATISCKASQSVDY | | |
| DGDSYMNWYQQKPGQPPKLLIYAASNLESGIPARFSGSGSGTDFTLNIHPVEEED | | |
| AATYYCQQSNEDPLTFGGGTKLELK | | |
| QVQLQQPGAELIKPGASVKLSCKASGYTFTSYWMHWVKQRPGQGLEWIGMIHP | 16 | 16 |
| NSGSTNYNEKFKSKATLTVDKSSSTAYMQLSSLTSEDSAVYYCARPGGYGFVYWG | | |
| QGTLVTVSAGGGSGGGGSGGGGSEIQMTQSPSSMSASLGDRITITCQATQDIVK | | |
| NLNWYQQKPGKPPSFLIYYATELAEGVPSRFSGSGSGSDYSLTINNLESEDFADYYC | | |
| LQFYEFPLTFGAGTKLELK | | |
| EVQLQQSGAELVKPGASVKLSCTPSGFNIKDTSLHWVKQGPEQGLEWIGRIDPAN | 17 | 17 |
| GNTKYDPKFQGKATITADTSSNTAYLQLSSLTSEDTAVYYCARGPDDGYFYYYSMD | | |
| YWGQGTSVTVSSGGGSGGGGSGGGGSDIQMTQSPASLSVSVGETVTITCRASEN | | |
| IYSNLAWYQQKQGKSPQLLVYAATNLADGVPSRFSGSGSGTQYSLKINSLQSEDFG | | |
| SYYCQHFWGTPWTFGGGTKLEIK | | |
| QVQLQQSGPELKKPGETVKISCKASGYTFTNYGMNWVKQAPGKGLKWMGWIN | 18 | 18 |
| TYTGEPTYADDFKGRFAFSLETSASTAYLQINNLKNEDMATYFCARKYYDYEFAYW | | |
| GQGTLVTVSAGGGSGGGGSGGGGSDIVMTQSPSSLAMSVGQKVTMSCKSSQSL | | |
| LNSSNQKNYLAWYQQKPGQSPKLLVYFASTRESGVPDRFIGSGSGTDFTLTISSVQ | | |
| AEDLADYFCQQHYSTPLTFGAGTKLELK | | |
| QVQLQESGGGLVKPGGSLKLSCAASGFTFSSYAMSWVRQTPEKRLEWVATISSGG | 19 | 19 |
| SYTYYPDSVKGRFTISRDNAKNTLYLQMSSLRSEDTAMYYCARHEEANWAWFAY | | |
| WGQGTLVTVSAGGGSGGGGSGGGGSQIVLTQSPAIMSASPGEKVTITCSASSSVS | | |
| YMHWFQQKPGTSPKLWIYSTSNLASGVPARFSGSGSGTSYSLTISRMEAEDAATY | | |
| YCQQRSSFPYTFGGGTKLEIK | | |
| QVQLKQSGPGLVQPSQSLSITCTVSGFSLTSYGVHWVRQSPGKGLEWLGVIWSG | 20 | 20 |
| GSTDYNAAFISRLSISKDNSKSQVFFKMNSLQANDTAIYYCASYYGSSRSYWYLDV | | |
| WGAGTTVTVSSGGGSGGGGSGGGGSSIVMTQTPKFLLVSAGDRVTITCKASQSV | | |
| SNDVAWYQQKPGQSPKLLIYYASNRYTGVPDRFTGSGYGTDFTFTISTVQAEDLA | | |
| VYFCQQDYTSLPTFGAGTKLEIK | | |
| QVKLVESGGDLVKPGGSLKLSCATSGFTFSSYGMSWVRQTPDKRLEWVATISSGG | 21 | 21 |
| SYTYYPDSVKGRFTISRDNAKNTLYLQMSSLKSEGTAMYYCARHNYSNWDWFAY | | |
| WGQGTLVTVSAGGGSGGGGSGGGGSDIQMTQSPSSLSASLGDTITITCHASQNI | | |
| NVWLSWYQQKPGNIPKLLIYKASNLHTGVPSRFSGSGSGTGFTLTISSLQPEDIATY | | |
| YCQQGQSYPLTFGGGTNLEIK | | |
| EVQLQQSGAELVKPGASVKLSCTPSGFNIKDTSLHWVKQGPEQGLEWIGRIDPAN | 22 | 22 |
| GNTKYDPKFQGKATITADTSSNTAYLQLSSLTSEDTAVYYCARGPDDGYFYYYSMD | | |
| YWGQGTSVTVSSGGGSGGGGSGGGGSETTVTQSPASLSMAIGEKVTIRCITSTDI | | |
| DDDMNWYQQKPGEPPKLLISEGNSLRPGVPSRFSSSGYGTDFVFTIENMLSEDVA | | |
| DYYCLQSDNLPLTFGAGTKLELK | | |
| QVQLQQSGAELMKPGASVKISCKATGYTFSSYWIEWVKQRPGHGLEWIGEILPGS | 23 | 23 |
| GSTSYNEKFKGKATFTADTSSNTAYMQLSSLTSEDSAVYYCARRGYGYDEGFDYW | | |
| GQGTTLTVSSGGGSGGGGSGGGGSDIKMTQSPSSMYASLGERVTITCKASQDINS | | |
| YLSWFQQKPGKSPKTLIYRANRLVDGVPSRFSGSGSGQDYSLTISSLEYEDMGIYYC | | |
| LQYDEFPPTFGAGTKLELK | | |
| QVQLQQPGAELVRPGASVKLSCKASGYTFTNYWMNWVKQRPGQGLEWIGLIDP | 24 | 24 |
| SDSETHYNQVFKDKATLTVDKSSSTAYMQLSSLTSEDSAVYYCATYDVYYRFAYWG | | |
| QGTLVTVSAGGGSGGGGSGGGGSDIQMTQSPSSLSASLGGKVTITCKASQDINKY | | |
| IAWYQHKPGKGPSLLIHYTSTLQPGIPSRFSGSGSGRDYSFSISNLEPEDIATYYCLQY | | |
| DNLMYTFGGGTKLEIK | | |
| QVQLQQPGAELVRPGASVKLSCKASGYTFTSYWINWVKQRPGQGLEWIGNIYPS | 25 | 25 |
| DSYTNYNQKFKDKATLTVDKSSSTAYMQLSSPTSEDSAVYYCTRGNYIDYWGQGT | | |
| TLTVSSGGGSGGGGSGGGGSENVLTQSPAIMSASLGEKVTMSCRASSSVNYMY | | |
| WYQQKSDASPKLWIYYTSNLAPGVPGRFSGSGSGNSYSLTISSMEGEDAATYYCQ | | |
| QFTSSHTFGGGTKLEIK | | |
| QVQLKESGPGLVAPSQSLSIPCTVSGFSLTSYGVHWVRQPPGKGLEWLGVIWAG | 26 | 26 |
| GTTNYNSALMSRLSISKDNSKSQVFLKMYSLQTDDTAMYYCARGDGYDDGYAM | | |
| DYWGQGTSVTVSSGGGSGGGGSGGGGSDIVLTQSPASLAVSLGQRATISCRASQ | | |
| SVSTSSYSYMHWYQQKPGQPPKLLIKYASNLESGVPARFSGSGSGTDFTLNIHPVE | | |
| EEDTATYYCQHSWEIPLTFGAGTKLELK | | |
| QVQLQQSGAELVKPGASVKLSCKASGSTFTTYYIYWVKQRPGQGLEWIGEINPSN | 27 | 27 |
| GGTNFNEKFKSKATLTVDKSSSTAYMQLSSLTSEDSAVYYCTSYYTHETYYYAMDY | | |
| WGQGTSVTVSSGGGSGGGGSGGGGSETTVTQSPASLSVATGEKVSIRCMTSIDID | | |
| DDMNWYQQKPGEPPKLLISEGNTLRPGVPSRFSSSGYGTDFVFTIENTLSEDVADY | | |
| YCLQSDNMPFTFGSGTKLEIK | | |
| QVQLQQPGAELVKPGASVKLSCKASGYTFTSYWMQWVKQRPGQGLEWIGEIDP | 28 | 28 |
| SDSYTNYNQKFKGKATLTVDTSSSTAYMQLSSLTSEDSAVYYCARAEYGYGNYPW | | |
| FAYWGQGTLVTVSAGGGSGGGGSGGGGSQAVVTQESALTTSPGGTVILTCRSST | | |
| GAVTTSNYANWVQEKPDHLFTGLIGGTSNRAPGVPVRFSGSLIGDKAALTITGAQ | | |
| TEDDAMYFCALWYSTHWVFGGGTKLTVL | | |
| QVQLQQPGAELVKPGASVKVSCKASGYTFTSYWMHWVKQRPGQGLEWIGRIHP | 29 | 29 |
| SDSDTNYNQKFKGKATLTVDKSSSTAYMQLSSLTSEDSAVYYCAIPYYYGGWYFDV | | |
| WGTGTTVTVSSGGGSGGGGSGGGGSQAVVTQESALTTSPGETVTLTCRSSTGAV | | |
| TTSNYANWVQEKPDHLFTGLIGGTNNRAPGVPARFSGSLIGDKAALTITGAQTED | | |
| EAIYFCALWYSNHLFGSGTKVTVL | | |
| EVKLVESGGDLVKPGGSLKLSCAASGFTFSSYGMSWVRQTPDKRLEWVATISSGG | 30 | 30 |
| SYTYYPDSVKGRFTISRDNAKNTLYLQMSSLKSEDTAMYYCARLYDAHWDYFDYW | | |
| GQGTTLTVSSGGGSGGGGSGGGGSQAVVTQESALTTSPGETVTLTCRSSTGAVTT | | |
| SNYANWVQEKPDHLFTGLIGGTNNRAPGVPARFSGSLIGDKAALTITGAQTEDEAI | | |
| YFCALWYSNHWVFGGGTKLTVL | | |
| QVQLQQPGSVLVRPGASVKLSCKASGYTFTSSWMHWAKQRPGQGLEWIGEIHP | 31 | 31 |
| NSGNTNYNEKFKGKATLTVDTSSSTAYVDLSSLTSEDSAVYYCAIYYDYDAYYFDYW | | |
| GQGTTLTVSSGGGSGGGGSGGGGSEIQMTQSPSSMSASLGDRITITCQATQDIVK | | |
| NLNWYQQKPGKPPSFLIYYATELAEGVPSRFSGSGSGSDYSLTISNLESEDFADYYC | | |
| LQFYEFPYTFGGGTKLEIK | | |
| QVQLQQPGAELVKPGASVKLSCKASGYTFTSYWMHWVKQRPGQGLEWIGMIH | 32 | 32 |
| PNSGSTNYNEKFKSKATLTVDKSSSTAYMQLSSLTSEDSAVYYCANPYYGYDVGY | | |
| WGQGTTLTVSSGGGSGGGGSGGGGSQIVLTQSPAIMSASPGEKVTMTCSASSSV | | |
| SYMYWYQQKPGSSPRLLIYDTSNLASGVPVRFSGSGSGTSYSLTISRMEAEDAATY | | |
| YCQQWSSYPLTFGAGTKLELK | | |
| EVQLVESGGDLVKPGGSLKLSCAASGFTFSSYGMSWVRQTPDKRLEWVATISSGG | 33 | 33 |
| SYTYYPDSVKGRFTISRDNAKNTLYLQMSSLKSEDTAMYYCTRHDDSSYDWFAYW | | |
| GQGTLVTVSAGGGSGGGGSGGGGSETTVTQSPASLSVATGEKVTIRCITSTDIDDD | | |
| MNWYQQKPGEPPKLLISEGNTLRPGVPSRFFSGGYGTDFVFTIENTLSEDVADYYC | | |
| LQSDNMPLMFGAGTKLELK | | |
| QVQLQQPGAELVKPGASVKLSCKASGYTFTNYWMHWVKQRPGQGLEWIGMIH | 34 | 34 |
| PNSGTTNYNEKFKSKATLTVDKSSSTTYMQLISLTSEDSAVYYCARFGDGYHFDYW | | |
| GQGTTLTVSSGGGSGGGGSGGGGSQIVLTQSPAIMSASPGEKVTITCSASSSVSY | | |
| MHWFQQRPGTSPKLWIYSTSNLASGVPARFSGSGSGTSYSLTISRMEAEDAATYY | | |
| CQQRSTYPTFGGGTKLEIK | | |
| QVQLQQSGPELKKPGETVKISCKASGYTFTNYGMNWVKQAPGKGLKWMGWIN | 35 | 35 |
| TNTGEPTYAEEFKGRFAFSLETSASTAYLQINNLKNEDTATYFCARWYPYFDYWGQ | | |
| GTTLTVSSGGGSGGGGSGGGGSEIQMTQSPSSMSASLGDRITITCQATQDIVKNL | | |
| NWYQQKPGKPPSFLIYYATELAEGVPSRFSGSGSGSDYSLTISNLESEDFADYYCLQ | | |
| FYEFPYTFGGGTKLEIK | | |
| QVQLQQSGAELAKPGASVKLSCKASGYTFTSYWMHWVKQRPGQGLEWIGYINP | 36 | 36 |
| SSGYTKYNQKFKDKATLTADKSSSTAYMQLSSLTYEDSAVYYCARSDGSSGNWYF | | |
| DVWGTGTTVTVSSGGGSGGGGSGGGGSDIQMTQSPASLSASVGETVTITCRASG | | |
| NIHNYLAWYQQKQGKSPQLLVYNAKTLADGVPSRFSGSGSGTQYSLKINSLQPED | | |
| FGSYYCQHFWSTPWTFGGGTKLEIK | | |
| QVQLQQPGAELVKPGASVKLSCKASGYTFTSYWMHWVKQRPGQGLEWIGMIH | 37 | 37 |
| PNSGSTNYNEKFKSKATLTVDKSSSTAYMQLSSLTSEDSAVYYCARDYGNYDYAM | | |
| DYWGQGTSVTVSSGGGSGGGGSGGGGSDIQMTQSPASLSVSVGETVTITCRASE | | |
| NIYSNLAWYQQKQGKSPQLLVYAATNLADGVPSRFSGSGSGTQYSLKINSLQSEDF | | |
| GSYYCQHFWGTPYTFGGGTKLEIK | | |
| QVQLQQSGAELMKPGASVKISCKATGYTFSSYWIEWVKQRPGHGLEWIGEILPGS | 38 | 38 |
| GSTSYNEKFKDKATFTADTSSNTAFMQLSSLTSEDSAVYYCARRAYGYDEGFDYW | | |
| GQGTTLTVSSGGGGSGGGGSGGGGSDIKMTQSPSSMYASLGERVTITCKASQDI | | |
| NSYLSWFQQKPGKSPKTLIYRANRLVDGVPSRFSGSGSGQDYSLTISSLEYEDMGIY | | |
| YCLQYDEFPLTFGGGTKLEIKR | | |
| QVQLQQSGAELMKPGASVKISCKATGYTFSSYWIEWVRQAPGHGLEWIGEVLPG | 39 | 39 |
| SGSTSYNEKFKGRATFTADTSSNTAYMQLSSLRSEDSAVYYCARRAYGYDEGFDY | | |
| WGQGTTVTVSSGGGGSGGGGSGGGGSDIKMTQSPSSMYASLGERVTITCKASQ | | |
| DINGYLSWYQQKPGKSPQTLLYRANRLVDGVPSRFRGSGSGQDYTLTISSLEYED | | |
| MGTYYCLQYDEFPPTFGGGTKLELKR | | |
| QVQLQQSGAELMKPGASVKISCKATGYTFSSYWIEWVRQAPGHGLEWIGEILPGS | 40 | 40 |
| GRTSYIEKFKGRATFTADTSSNTAYMQLSSLRSEDSAVYYCARRGYGYDEGFDYW | | |
| GQGTTVTVSSGGGGSGGGGSGGGGSDIKMTQSPSSMYASLGERVTITCKASQDI | | |
| NSYLSWYQQKPGKSPKTLIYRAKRLVDGVPSRFSGSGSGQDYTLTISSLEYEDMGT | | |
| YYCLQYDEFPPTFGGGTKLELKR | | |
| QVQLQQSGAELMKPGASVKISCKATGYTFSSYWIEWVKQRPGHGLEWIGEVLPG | 41 | 41 |
| SGSTSYNEKFKGKATFTADTSSNTAYMQLSSLTSEDSAVYYCARRAYGYDEGFDY | | |
| WGQGTTLTVSSGGGGSGGGGSGGGGSDIKMTQSPSSMYASLGERVTITCKASQ | | |
| DINGYLSWFQQKPGKSPQTLLYRANRLVDGVPSRFRGSGSGQDYSLTISSLEYEDM | | |
| GIYYCLQYDEFPPTFGAGTKLELKR | | |
| QVQLQQSGAELMKPGASVKISCKATGYTFSSYWIEWVKQRPGHGLEWIGEILPGS | 42 | 42 |
| GRTSYIEKFKGKATFTADTSSNTAYMQLSSLTSEDSAVYYCARRGYGYDEGFDYWG | | |
| QGTTLTVSSGGGGSGGGGSGGGGSDIKMTQSPSSMYASLGERVTITCKASQDINS | | |
| YLSWFQQKPGKSPKTLIYRAKRLVDGVPSRFSGSGSGQDYSLTISSLEYEDMGIYYC | | |
| LQYDEFPPTFGAGTKLELKR | | |
| QVQLQQSGAELMKPGASVKISCKATGYTFSSYWIEWVKQRPGHGLEWIGEILPGS | 43 | 43 |
| GSTNYNEKFKGKATFTADTSSNTAYMQLSSLTSEDSAVYYCARRAYGYDGGFDYW | | |
| GQGTTLTVSSGGGGSGGGGSGGGGSDIKMTQSPSSMYASLGERVTITCKASQDI | | |
| NSYLSWFQQKPGKSPKTLIYRANRLVDGVPSRFSGSGSGQDYSLTISSLEYEDMGIY | | |
| YCLHYDEFPPTFGAGTKLELKR | | |
| QVQLQQSGAELMKPGASVKISCKATGYTFSSYWIEWVKQRPGHGLEWIGEILPGS | 44 | 44 |
| DSTSYNEKFKGKTTFTADTSSNTAYMQLSSLTSEDSAVYYCARRAYGYDEGFDYW | | |
| GQGTTLTVSSGGGGSGGGGSGGGGSDIKMTQSPSSMYASLGERVTITCKASQDI | | |
| NSYLSWFQQKPGKSPKTLIYRANRLVDGVPSRFSGSGSGQDYSLTISSLEYEDMGIY | | |
| YCLQYDEFPPTFGAGTKLELKR | | |
| QVQLQQSGAELMKPGASVKISCKATAYTFSIYWIEWVKQRPGHGLEWIGEILPGS | 45 | 45 |
| GSTNYNEKVKGKATFTADTSSNTAYMQLSSLTSEDSAVYYCARRAYGYDGGFDY | | |
| WGQGTTLTVSSGGGGSGGGGSGGGGSDIKMTQSPSSMYASLGERVTITCKASQ | | |
| DINSYLSWFQQKPGKSPKTLIYRANRLVDGVPSRFSGSGSGQDYSLTISSLEYEDM | | |
| GIYYCLQYDEFPPTFGAGTKLELKR | | |
| QVQLQQSGAELMKPGASVKISCKATGYTFSSYWIEWVKQRPGHGLEWIGEIFPGS | 46 | 46 |
| GHTSFNEKFKGKATFTADTSSNTAYIQLSSLTSEDSAVYYCARRGYGYDEGFDYWG | | |
| QGTTLTVSSGGGGSGGGGSGGGGSDIKMTQSPSSMYASLGERVTITCKASQDINS | | |
| YLSWFQQKPGKSPKTLIYRANRLVDGVPSRFSGSGSGQDYSLTISSLEYEDMGIYYC | | |
| LQYDEFPPTFGAGTKLELKR | | |
| QVQLQQSGAELMKPGASVKMSCKATGYTFSNYWIEWVKQRPGHGLEWIGEILP | 47 | 47 |
| GSGSTSYNEKFKGKATFTADTSSSTAYMQLSSLTSEDSAVYYCARRGYGYDEGFDY | | |
| WGQGSTLTVSSGGGGSGGGGSGGGGSDIKMTQSPSSMYASLGERVTITCKASQ | | |
| DINSYLSWFQQKPGKSPKTLIYRANRLVDGVPSRFSGSGSGQDYSLTISSLEYEDM | | |
| GIYYCLQYDEFPPTFGAGTKLELKR | | |
| QVQLQQSGAELMKPGASVKISCKATGYTFSSYWIEWVKQRPGHGLEWIGEILPGS | 48 | 48 |
| GSTSYNEKFKGKATFTADTSSNTAYMQLSSLTSEDSAVYYCARRGYGYDEGFDYW | | |
| GQGTTLTVSSGGGGSGGGGSGGGGSDIKMTQSPSSMYASLGERVTITCKASQDI | | |
| NSYLSWFQQKPGKSPKTLIYRANRLVDGVPSRFSGSGSGQDYSLTISSLEYEDMGIY | | |
| YCLQYDEFPPTFGAGTKLELKR | | |
| QVQLQQSGAELMKPGASVKISCKATGYTFSSYWIEWVQQRPGHGLEWIGEILPG | 49 | 49 |
| SGYTSYIEQFKGKATFTADTSSNTAYMQLGSLTSEDSAVYYCARRGYGYDEGFDY | | |
| WGQGTTLTVSSGGGGSGGGGSGGGGSDIKMTQSPSSMYASLGERVTITCKASQ | | |
| DINSYLSWFHQKPGKSPKTLIYRANRLVDGVPSRFSGSGSGQDYSLTISSLEYEDMG | | |
| IYYCLQYDEFPPTFGAGTKLELKR | | |
| QVQLQQSGAELMKPGASVKISCKATGYTLSSYWIEWVKQRPGHGLEWIGEILPGS | 50 | 50 |
| GSTSYNEKFKGKATFTADTSSSTAYMQLSSLTSEDSAVYYCARRGYGYDEGFDYW | | |
| GQGTTLTVSSGGGGSGGGGSGGGGSDIKMTQSPSSMYASLGERVTITCKASQDI | | |
| NSYLSWFQQKPGKSPKTLIYRANRLVDGVPSRFSGSGSGQDYSLTISSLEYEDMGIY | | |
| YCLQYDEFPPTFGAGTKLELKR | | |
| QVQLQQSGAELMKPGASVKISCKGTGYTFSSYWIEWVKQRPGHGLEWIGEISPGS | 51 | 51 |
| GSTNYNEKFKGKATFTADTSSNTAYMQLSSLTSEDSAVYYCARRGYGYDEGFDYW | | |
| GQGTTLTVSSGGGGSGGGGSGGGGSDIKMTQSPSSMYASLGERVTITCKASQDI | | |
| NSYLSWFQQKPGKSPKTLIYRANRLVDGVPSRFSGSGSGQDYSLTISSLEYEDMGIY | | |
| YCLQYDEFPPTFGAGTKLELKR | | |
| QVQLQQSGAELMKPGASVKISCKATGYTFGTYWIEWVKQRPGHGLEWIGEILPG | 52 | 52 |
| SGTPNYNEKFKGKATFTADTSSNTAYMQLSSLTSEDSAVYYCARRAYGYDAGFDY | | |
| WGQGTTLTVSSGGGGSGGGGSGGGGSDIKMTQSPSSMYASLGERVTITCKASQ | | |
| DINSYLSWFQQKPGKSPKTLIYRANRLVDGVPSRFSGSGSGQDYSLTISSLEYEDM | | |
| GFYYCLQYDEFPPTFGAGTKLELKR | | |
| QVQLQQSGAELMKPGASVKISFKATGYTFSSYWIEWVKQRPGHGLEWIGEILPGS | 53 | 53 |
| GSTSCNEKFKGKATFTADTSSNTAYMQLSSLTSEDSAVYYCARRGYGYDEGFDYW | | |
| GQGTTLTVSSGGGGSGGGGSGGGGSDIKMTQSPSSIYASLGERVTITCKASQDINS | | |
| YLNWFQQKPGKSPKTLIYRANRLVDGVPSRFSGSGSGQDYSLTISSLEYEDMGIYYC | | |
| LQYDEFPPTFGVGTKLELKR | | |
| QVQLQQSGAELMKPGASVKISCKATGYTFSSYWIEWVKQRPGHGLEWIGEILPGS | 54 | 54 |
| GRTSYIEKFKGKATFTADTSSNTAYMQLSSLTSEDSAVYYCARRGYGYDEGFDYWG | | |
| QGTTLTVSSGGGGSGGGGSGGGGSDIKMTQSPSSMYASLGERVTITCKASQDINS | | |
| YLSWFQQKPGKSPKTLIYRANRLVDGVPSRFSGSGSGQDYSLTISSLEYEDMGIYYC | | |
| LQYDEFPPTFGAGTKLELKR | | |
| QVQLQQSGAELMKPGASVKMSCKATGYTFSNYWIEWVKQRPGHCLEWIGEILP | 55 | 55 |
| GSGSTSYNEKFKGKATFTADTSSSTAYMQLSSLTSEDSAVYYCARRGYGYDEGFDY | | |
| WGQGSTLTVSSGGGGSGGGGSGGGGSDIKMTQSPSSMYASLGERVTITCKASQ | | |
| DINSYLSWFQQKPGKSPKTLIYRANRLVDGVPSRFSGSGSGQDYSLTISSLEYEDM | | |
| GIYYCLQYDEFPPTFGCGTKLELKR | | |
| QVQLQQSGAELMKPGASVKISCKATGYTFSSYWIEWVKQRPGHCLEWIGEILPGS | 56 | 56 |
| GSTSYNEKFKGKATFTADTSSNTAYMQLSSLTSEDSAVYYCARRGYGYDEGFDYW | | |
| GQGTTLTVSSGGGGSGGGGSGGGGSDIKMTQSPSSMYASLGERVTITCKASQDI | | |
| NSYLSWFQQKPGKSPKTLIYRANRLVDGVPSRFSGSGSGQDYSLTISSLEYEDMGIY | | |
| YCLQYDEFPPTFGCGTKLELKR | | |
| LVKTGASVKISCKASGYSFTGYYMHWVKQSHGKSLEWIGYISSYNGVTGYNQKFK | 57 | 57 |
| GKATFTVDTSSSTAYMQFNSLTSEDSAVYYCARGRYGDYFDYWGQGTTLTVSSGG | | |
| GGSGGGGSGGGGSDIQMTQSPASLSVSVGETVTITCRASDNIYSNLAWYQQKQG | | |
| KSPQLLVYAATNLADGVPSRFSGSGSGTQYSLKINSLQSEDFGSYYCQHFWGTPW | | |
| TFGGGTKLEIKR | | |
| LVKTGASVKISCKASGYSFTGYYMHWVKQSHGKSLEWIGYISSYNGATSYNQKFK | 58 | 58 |
| GKATFTVDTSSSTAYMQFNSLTSEDSAVYYCARGRYGEYFDYWGQGTTLTVSSGG | | |
| GGSGGGGSGGGGSDIQMTQSPASLSVSVGETVTITCRASENIYSNLAWYQQKQG | | |
| KSPQLLVFAATYLADGVPSRFSGSGSGTQYSLKINSLQSEDFGNYYCQHFWGTPW | | |
| TFGGGTKLEIKR | | |
| QVQLKQSGPGLVQPSQSLSITCTVSGFSLSSYGVHWVRQSPGKALEWLGVIWRG | 59 | 59 |
| GSTDYNAAFMSRLSITKDNSKSQVFFKMNSLQADDTAIYYCAKNLYGHYVMDYW | | |
| GQGTSVTVSSGGGGSGGGGSGGGGSDIKMTQSPSSMYASLGERVTITCKASQDI | | |
| NSYLSWFQQKPGKSPKTLIYRANRLVDGVPSRFSGSGSGQDYSLTISSLEYEDMGIY | | |
| YCLQYDEFPPTFGAGAKLELKR | | |
| QVQLKQSGPGLVQPSQSLSITCTVSGFSVTSYGVHWVRQSPGKGLEWLGVIWRG | 60 | 60 |
| GSTDYNAAFMSRLSITKDNSKSQVFFKMNSLQADDSAIYYCAKNLYGHYVMDYW | | |
| GQGTSVTVSSGGGGSGGGGSGGGGSNIVMTQSPKSMSMSVGERVTLSCKASEN | | |
| VVTYVSWYQQKPEQSPKLLIYGASNRYTGVPDRFTGSGSATDFTLTISSVQAEDLA | | |
| DYHCGQSYSYPFTFGSGTKLEIKR | | |
| QVQLKQSGPGPVQPSQSLSITCTVSGFSLTSYGVHWVRQSPGKGLEWLGVIWRG | 61 | 61 |
| GSTDNNAAFMSRLSITKDNSKSQVFFKMNSLQADDTAIYYCAKNLYGHYVMDYW | | |
| GQGTSVTVSSGGGGSGGGGSGGGGSNIVMTQSPKSMSMSVGERVTLSCKASEN | | |
| VVTYVSWYQQKPEQSPKLLIYGASNRYTGVPDRFTGSGSATDFTLTISSVQAEDLA | | |
| DYHCGQSYSYPFTFGSGTKLEIKR | | |
| QVQLKQSGPGLVQPSQSLSITCTVSGFSLTRYGVHWVRQSPGKGLEWLGVIWRG | 62 | 62 |
| GSTDHNAAFMSRLSITKDNSKSQVFFKMNSLQADDTAIYYCAKNLYGHYVMDYW | | |
| GQGTSVTVSSGGGGSGGGGSGGGGSNIVMTQSPKSMSMSVGERVTLSCKASEN | | |
| VVTYVSWYQQKPEQSPKLLIYGASNRYTGVPDRFTGSGSATDFTLTISSVQAEDLA | | |
| DYHCGQSYSYPFTFGSGTKLEIKR | | |
| QVQLKQSGPGLVQPSQSLSITCTVSGFSVTTYGVHWVRQSPGKGLEWLGVIWRG | 63 | 63 |
| GSTDYNAAFMSRLSITKDNSKSQVFFKMNSLQADDTAIYYCAKNLYGHYVMDYW | | |
| GQGTSVTVSSGGGGSGGGGSGGGGSNIVMTQSPKSMSMSVGERVTLSCKASEN | | |
| VVTYVSWYQQKPEQSPKLLIYGASNRYTGVPDRFTGSGSATDFTLTISSVQAEDLA | | |
| DYHCGQSYSYPFTFGSGTKLEIKR | | |
| QVQLQQPGAELVKPGASVKLSCKASGYTFTSYWMHWVKQRPGQGLEWIGMIH | 64 | 64 |
| PNSGSTNYNEKFKSKATLTVDKSSSTAYMQLSSLTSEDSAVYYCARWGDGYSFAY | | |
| WGQGTLVTVSAGGGGSGGGGSGGGGSQIVLTQSPAIMSASPGEKVTMTCSASS | | |
| SVSYMHWYQQKSGTSPKRWIYDTSKLASGVPARFSGSGSGTSYSLTISSMEAEDA | | |
| ATYYCQQWSSNPLYTFGGGTKLEIKR | | |
| QVQLQQPGAELVKPGASVKLSCKASGYTFTSYWMHWVKQRPGQGLEWIGMIH | 65 | 65 |
| PNSGTTNYNEKFKSKATLTVDKSSSTAYMQLSSLTSEDSAVYYCARWGDGYSFAY | | |
| WGQGTLVTVSAGGGGSGGGGSGGGGSQIVLTQSPAIMSASPGEKVTMTCSASS | | |
| SVSYMHWFQQKSGTSPKRWIYDTSKLASGVPARFSGSGSGTSYSLTFSSMEAEDA | | |
| ATYYCQQWSSNPLYTFGGGTKLEIKR | | |
| QVQLKQSGPELVKPGASVKMSCKASGYTFTDYVINWVKQRTGQGLEWIGEIYPG | 66 | 66 |
| SGSTYYNEKFKGKATLTADKSSNTVYMQLSSLTSEDSAVYFCARRGERGPWFAYW | | |
| GQGTLVTVSAGGGGSGGGGSGGGGSDIVLTQSPASLAVSLGQRATISCKASQSVD | | |
| YDGDSYMNWYQQKPGQPPKLLIYAASNLESGIPARFSGSGSGTDFTLNIHPVEEE | | |
| DAATYYCQQSNEDPLTFGAGTKLELKR | | |
| QVQLKQSGPELVKPGASVKMSCKASGYTFTDYVINWVKQRTGQGLEWIGEIYPG | 67 | 67 |
| SGSSYYNEKFKGKATLTADKSSNTAYMQLSSLTSEDSAVYFCARRGERGPWFAYW | | |
| GQGTLVTVSAGGGGSGGGGSGGGGSDIVLTQSPASLAVSLGQRATISCKASQSVD | | |
| YDGDSYMNWYQQKPGQPPKLLIYAASNLESGIPARFSGSGSGTDFTLNIHPVEEE | | |
| DAATYYCQQSNEDPLTFGAGTKLELKR | | |
| QVQLKQSGPELVKPGASVKMSCKASGYTFTDYVINWVKQRTGQGLEWIGEIYPG | 68 | 68 |
| SGSSYYNEKFRGKATLTADKSSNTAYMQLSSLTSEDSAVYFCARRGERGPWFAYW | | |
| GQGTLVTVSAGGGGSGGGGSGGGGSDIVLTQSPASLAVSLGQRATISCKASQSVD | | |
| YDGDSYMNWYQQKPGQPPQLLIYAASNLQSGIPARFSGSGSGTDFTLNIHPVEEE | | |
| DAATYYCQQSNEDPLTFGAGTKLELKR | | |
| QVQLKQSGPELVKPGASVKMSCKASGYTFTDYVINWVKQKTGQGLEWIGEIYPG | 69 | 69 |
| SGSSYYNEKFKGKATLTADKSSNTAYIQLSSLTSEDSAVYFCARRGERGPWFAYWG | | |
| QGTLVTVSAGGGGSGGGGSGGGGSDIVLTQSPASLAVSLGQRATISCKASQSVDY | | |
| DGDSYMNWYQQKPGQPPKLLIYAASNLESGIPARFGGSGSGTDFTLNIHPVEEED | | |
| AATYYCQQSNEDPLTFGAGTKLELKR | | |
| QVQLQQPGAELVKPGASVKLSCKASGYTFTSYWMHWVKQRPGQGLEWIGMIH | 70 | 70 |
| PNSGSPNYNEKFKSKATLTVDKSSSTAYMQLSSLTSEDSAVYYCARPGGYGFAYW | | |
| GQGTLVTVSAGGGGSGGGGSGGGGSEIQMTQSPSSMSASLGDRITITCQATQDI | | |
| VKNLNWYQQKPGKPPSFLIYYATELAEGVPSRFSGSGSGSDYSLTISNLESEDFADY | | |
| YCLQFYEFPLTFGAGTKLELKR | | |
| QVQLQQSGPELVKPGASVKMSCKASGYTFTDYVISWVKQRTGQGLEWIGEIYPG | 71 | 71 |
| SGSSYYNEKFKGKATLTADKSSNTAYMQLSSLTSEDSAVYFCARPGDLGFAYWGQ | | |
| GTLVTVSAGGGGSGGGGSGGGGSDIVLTQSPASLAVSLGQRATISCKASQSVDYD | | |
| GDSYMNWYQQKPGQPPKLLIYAASNLESGIPARFSGSGSGTDFTLNIHPVEEEDA | | |
| ATYYCQQSNKDPLTFGAGTKLELKR | | |
| QVQLQQSGPELVKPGASVKMSCKASGYTFTDYVISWVKQRTGQGLEWIGEIYPG | 72 | 72 |
| SGSSYYNEKFKGKATLTADKSSNTAYMQLSSLTSEDSAVYFCARPGDLGFAYWGQ | | |
| GTLVTVSAGGGGSGGGGSGGGGSDIVLTQSPASLAVSLGQRATISCKASQSVDYD | | |
| GDSYMNWYQQKPGQPPKLLIYAASNLESGIPARFSGSGSGTDFTLNIHPVEEEDA | | |
| ATYYCQQSNKDPLTFGAGTKLELKR | | |
| QVQLQQSGPELVKPGASVKMSCKASGYTFTDYVISWVKQRTGQGLEWIGEIYPG | 73 | 73 |
| SGSNYYNEKFKGKAIMTADKSSNTAYMQLSSLTSEDSAVYFCARPGDLGFAYWG | | |
| QGTLVTVSAGGGGSGGGGSGGGGSDIVLTQSPASLAVSLGQRATISCKASQSVDY | | |
| DGDSYMNWYQQKPGQPPKLLIYAASNLESGIPARFSGSGSGTDFTLNIHPVEEED | | |
| AATYYCQQSNEDPLTFGAGTKLELKR | | |
| QVQLQQSGPELVKPGASVKMSCKASGYTFTDYVISWVKQRTGQGLEWIGEIYPG | 74 | 74 |
| SGSSYYNEKFKGKATLTADKSSNTAYMQLSSLTSEDSAVYFCARPGDLGFAYWGQ | | |
| GTLVTVSAGGGGSGGGGSGGGGSDIVLTQSPASLAVSLGQRATISCKASQSVDYD | | |
| GDSYMNWYQQKPGQPPKLLIYAASNLESGIPARFSGSGSGTDFTLNIHPVEEEDA | | |
| ATYYCQQSNKDPFTFGAGTKLELKR | | |
| /QVQLQQSGPELVKPGASVKMSCKASGYTFTDYVISWVRQAPGQGLEWIGEIYP | 75 | 75 |
| GSGSSYYNEKFKGRATLTADKSSNTAYMQLSSLRSEDSAVYFCARPGDLGFAYWG | | |
| QGTLVTVSSGGGGSGGGGSGGGGSDIVLTQSPSSLAVSLGQRATISCKASQSVDY | | |
| DGDSYMNWYQQKPGQPPKLLIYAASNLESGIPARFSGSGSGTDFTLTIHPVEEEDA | | |
| ATYYCQQSNKDPFTFGGGTKLELKR | | |
| QVQLQQSGPELVKPGASVKMSCKASGYTFTDYVISWVKQRTGQGLEWIGEIYPG | 76 | 76 |
| SGSSYYNEKFKGKATLTADKSSNTAYMQLSSLTSEDSAVYFCARPGDLGFAYWGQ | | |
| GTLVTVSSGGGGSGGGGSGGGGSDIVLTQSPASLAVSLGQRATISCKASQSVDYD | | |
| GDSYMNWYQQKPGQPPKLLIYAASNLESGIPARFSGSGSGTDFTLNIHPVEEEDA | | |
| ATYYCQQSNKDPFTFGAGTKLELKR | | |
| QVQLKESGPGLVAPSQSLSITCTVSGFSLTNYGVHWVRQPPGKGLEWLGVVWAG | 77 | 77 |
| GITNYNWALMSRLSISKDNSKSQVFLKMNSLQTDDTAMYYCARGDGYDDGYAM | | |
| DYWGQGTSVTVSSGGGGSGGGGSGGGGSDIVLTQSPASLAVSLGQRATISCRAS | | |
| QSVSTSSYSYMHWYQQKPGQAPKLLIKYASNLESGVPARFSGSGSGTDFTLNIHPV | | |
| EEEDTATYYCQHSWEIPLTFGAGAKLELKR | | |
| QVQLKESGPGLVAPSQSLSITCTVSGFSLTSYGVHWVRQPPGKGLEWLGVLWAG | 78 | 78 |
| GITNYNSALMSRLSIRKDNSKSQVFLKMYSLHTDDTAMYYCARGDGYDDGYAMD | | |
| YWGQGTSVTVSSGGGGSGGGGSGGGGSDIVLTQSPASLAVSLGQRATISCRASQ | | |
| SVSTSSYSYMHWYQQKPGQPPKLLIKYASNLESGVPARFSGSGSGTDFTLNVHPV | | |
| EEEDTATYYCQHSWEIPLTFGAGTKLELKR | | |
| QVQLKESGPGLVAPSQSLSIPCTVSGFSLTSYGVHWVRQPPGKGLEWLGVIWAG | 79 | 79 |
| GTTNYNSALMSRLSISKDNSKSQVFLKMYSLQTDDTAMYYCARGDGYDDGYAM | | |
| DYWGQGTSVTVSSGGGGSGGGGSGGGGSDIVLTQSPASLAVSLGQRATISCRAS | | |
| QSVSTSSYSYMHWYQQKPGQPPKLLIKYASNLESGVPARFSGSGSGTDFTLNIHPV | | |
| EEEDTATYYCQHSWEIPLTFGAGTKLELKR | | |
| EVQLQQSGAELVRSGASVKLSCTASGFNIKDYYMHWVKQRPEQGLEWIGWIDPE | 80 | 80 |
| NGDTEYAPKFQGKATMTADTSSNTAYLQLSSLTSEDTAVYYCNAPLLRYSSAMDY | | |
| WGQGTSVTVSSGGGGSGGGGSGGGGSQAVVTQESALTTSPGGTVILTCRSSTGA | | |
| VTTSNYANWVQEKPDHLFTGLIGGTSNRAPGVPVRFSGSLIGDKAALTITGAQTED | | |
| DAMYFCALWYSTHYVFGGGTKVTVLR | | |
| EVQLQQSGAELVRSGASVKLSCTASGFNIKDYYIHWVKQRPEQGLEWIGWIDPEN | 81 | 81 |
| GDTEYAPKFQGKATMTADTSSNTAYLQLSSLTSEDTAVYYCNAPLLRYSSSMDYW | | |
| GQGTSVTVSSGGGGSGGGGSGGGGSQAVVTQESALTTSPGGTVILTCRSSTGAV | | |
| TTSNYANWVQEKPDHLFTGLIGGTSNRAPGVPVRFSGSLIGDKAALTITGAQTEDD | | |
| AMYFCALWYSTHYVFGGGTKVTVLR | | |
| EVQLQQSGAELVRSGASVKLSCTASGFNIKDYYMHWVKQRPEQGLEWIGWIDPE | 82 | 82 |
| NGDTEYAPKFQGKATMTADTSSNTAYLQLSSLTSEDTAVYYCNVALLRYSSAMDY | | |
| WGQGTSVTVSSGGGGSGGGGSGGGGSQAVVTQESALTTSPGGTVILTCRSSTGA | | |
| VTTSNYANWVQEKPDHLFTGLIGGTSNRAPGVPVRFSGSLIGDKAALTITGAQTED | | |
| DAMYFCALWYSTHYVFGGGTKVTVLR | | |
| QVQLQQSGPELVKPGASVKMSCKASGYTFTDYVISWVKQRTGQGLEWIGEIYPG | 83 | 83 |
| SGSTYYNEKFKGKATLTADKSSNTAYMQLSSLTSEDSAVYFCARRGERGPWFAYW | | |
| GQGTLVTVSAGGGGSGGGGSGGGGSDIVLTQSPASLAVSLGQRATISCKASQSVD | | |
| YDGDSYMNWYQQKPGQPPKLLIYAASNLESGIPARFSGSGSGTDFTLNIHPVEEE | | |
| DAATYYCQQSNEDPLTFGAGTKLELKR | | |
| QVQLQQPGAELVKPGASVKLSCKASGYTFTSYWMQWVKQRPGQGLEWIGEIDP | 84 | 84 |
| SDSYTNYNQKFKGKATLTVDTSSSTAYMQLSSLTSEDSAVYYCARAEYGYGNYPW | | |
| FAYWGQGTLVTVSAGGGGSGGGGSGGGGSQAVVTQESALTTSPGGTVILTCRSS | | |
| TGAVTTSNYANWVQEKPDHLFTGLIGGTSNRAPGVPVRFSGSLIGDKAALTITGA | | |
| QTEDDAMYFCALWYSTHWVFGGGTKLTVLR | | |
| QVQLQQSGPELKKPGETVKISCKASGYTFTNYGMNWVKQAPGKGLKWMGWIN | 85 | 85 |
| TYTGEPTYADDFKGRFAFSLETSASTAYLQINNLKNEDMATYFCARKYYDYEFAYW | | |
| GQGTLVTVSAGGGGSGGGGSGGGGSDIVMTQSPSSLAMSVGQKVTMSCKSSQS | | |
| LLNSSNQKNYLAWYQQKPGQSPKLLVYFASTRESGVPDRFIGSGSGTDFTLTISSV | | |
| QAEDLADYFCQQHYSTPLTFGAGTKLELKR | | |
| QVQLQQSGAELVRPGASVTLSCKASGYTFTDYEMHWVKQTPVHGLEWIGAIDPE | 86 | 86 |
| TGGTAYNQKFKVKAILTADKSSSTAYMELRSLTSEDSAVYYCTRLGDYDVMDYWG | | |
| QGTSVTVSSGGGGSGGGGSGGGGSDIQMTQTTSSLSASLGDRVTISCRASQDISN | | |
| YLNWYQQKPDGTVKLLIYYTSRLHSGVPSRFSGSGSGTDYSLTISNLEQEDIATYFC | | |
| QQDNTLPRTFGGGTKLEIKR | | |
| QVQLQQPGSVLVRPGASVKLSCKASGYTFTSSWMHWAKQRPGQGLEWIGEIHP | 87 | 87 |
| NSGNTNYNEKFKGKATLTVDTSSSTAYVDLSSLTSEDSAVYYCAIYYDYDAYYFDYW | | |
| GQGTTLTVSSGGGGSGGGGSGGGGSEIQMTQSPSSMSASLGDRITITCQATQDIV | | |
| KNLNWYQQKPGKPPSFLIYYATELAEGVPSRFSGSGSGSDYSLTISNLESEDFADYY | | |
| CLQFYEFPYTFGGGTKLEIKR | | |
| QVQLQQSGPELVKPGASVKMSCKASGYTFTDYVISWVKQRTGQGLEWIGEIYPG | 88 | 88 |
| SGSNYYNEKFKGKATLTADKSSNTAYMQLSSLTSEDSAVYFCAREEKIYFDYWGQG | | |
| TTLTVSSGGGGSGGGGSGGGGSDIVLTQSPASLAVSLGQRATISCKASQSVDYDG | | |
| DSYMNWYRQKPGQPPKLLIYAASNLESGIPARFSGSGSGTDFTLNIHPVEEEDAAT | | |
| YYCQQSNEDPWTFGGGTKLEIKR | | |
| EVQLQQSGTVLARPGASVKMSCKTSGYTFTSYWMHWIKQRPGQGLEWIGAIYP | 89 | 89 |
| GNSDTTYNQKFKGKAKLTAVTSASTAYMELSSLTNEDSAVYYCTSLITTAYYFDYW | | |
| GQGTTLTVSSGGGGSGGGGSGGGGSEIQMTQSPSSMSASLGDRITITCQATQDIV | | |
| KNLNWYQQKPGKPPSFLIYYATELAEGVPSRFSGSGSGSDYSLTISNLESEDFADYY | | |
| CLQFYEFPLTFGAGTKLELKR | | |
| QVQLQESGGGLVKPGGSLKLSCAASGFTFSSYAMSWVRQTPEKRLEWVATISSGG | 90 | 90 |
| SYTYYPDSVKGRFTISRDNAKNTLYLQMSSLRSEDTAMYYCARHEEANWAWFAY | | |
| WGQGTLVTVSAGGGGSGGGGSGGGGSQIVLTQSPAIMSASPGEKVTITCSASSS | | |
| VSYMHWFQQKPGTSPKLWIYSTSNLASGVPARFSGSGSGTSYSLTISRMEAEDAA | | |
| TYYCQQRSSFPYTFGGGTKLEIKR | | |
| QVQLQQSGPQLVSPGASVKISCKASGYSFTNYWMHWVKQRPGQGLEWIGMID | 91 | 91 |
| PSDSETRLNQQFKDKATLTVDESSSTAYMQLSSPTSEDSAVYYCAIPYYAMDYWG | | |
| QGTSVTVSSGGGGSGGGGSGGGGSDIKMTQSPSSMYASLGERVTITCKASQDIN | | |
| SYLSWFQQKPGKSPKTLIYRANRLVDGVPSRFSGSGSGQDYSLTISSLEYEDMGIYY | | |
| CLQYDEFPLTFGAGTKLELKR | | |
| QVQLQQPGSVLVRPGASVKLSCKASGYTFTSSWMHWAKQRPGQGLEWIGEIHP | 92 | 92 |
| NSGNTNYNEKNKGKATLTVDTSSSTAYVDLSSLTSEDSAVYYCATYYGNYVWYFD | | |
| VWGAGTSVTVSSGGGGSGGGGSGGGGSDIQMTQSPSSLSASLGERVSLTCRASQ | | |
| DIHGYLNLFQQKPGETIKHLIYETSNLDSGVPKRFSGSRSGSDYSLIIGSLESEDFADY | | |
| YCLQYASSPLTFGAGTKLELKR | | |
| QVQLQQPGAELVKPGASVKLSCKASGYTFTSYWMHWVKQRPGQGLEWIGMIH | 93 | 93 |
| PNSGSTNYNEKFKSKATLTVDKSSSTAYMQLSSLTSEDSAVYYCASYGSSYWYFDV | | |
| WGTGTTVTVSSGGGGSGGGGSGGGGSDIVMTQSHKFMSTSVGDRVSITCKASQ | | |
| DVGTAVAWYQQKPGQSPKLLIYWASTRHTGVPDRFTGSGSGTDFTLTISNVQSED | | |
| LADYFCQQYSSYPFTFGSGTKLEIKR | | |
| QVQLKQSGPGLVQPSQSLSITCTVSGFSLTSYGVHWVRQSPGKGLEWLGVIWSG | 94 | 94 |
| GSTDYNAAFISRLSISKDNSKSQVFFKMNSLQANDTAIYYCASYYGSSRSYWYLDV | | |
| WGAGTTVTVSSGGGGSGGGGSGGGGSSIVMTQTPKFLLVSAGDRVTITCKASQS | | |
| VSNDVAWYQQKPGQSPKLLIYYASNRYTGVPDRFTGSGYGTDFTFTISTVQAEDL | | |
| AVYFCQQDYTSLPTFGAGTKLEIKR | | |
| QVKLVESGGDLVKPGGSLKLSCAASGFTFSSYGMSWVRQTPDKRLEWVATISSGG | 95 | 95 |
| SYTYYPDSVKGRFTISRDNAKNTLYLQMSSLKSEDTAMYYCARQNDSSWAWFAY | | |
| WGQGTLVTVSAGGGGSGGGGSGGGGSETTVTQSPASLSVATGEKVTIRCITSTDI | | |
| DDDMNWYQQKPGEPPKLLISEGNTLRPGVPSRFSSSGYGTDFVFTIENTLSEDVA | | |
| DYYCLQSDNMPLTFGAGTKLELKR | | |
| QVQLQQPGAELVKPGASVKLSCKASGYTFTSYWMHWVKQRPGQGLEWIGMIH | 96 | 96 |
| PNSGSTNYNEKFKSKATLTVDKSSSTAYMQLSSLTSEDSAVYYCALPYSNYGWYFD | | |
| VWGTGTTVTVSSGGGGSGGGGSGGGGSDIQMTQTTSSLSASLGDRVTISCRASQ | | |
| DISNYLNWYQQKPDGTVKLLIYYTSRLHSGVPSRFSGSGSGTDYSLTISNLEQEDIAT | | |
| YFCQQGNTLPFTFGSGTKLEIKR | | |
| QVQLQQPGAELVRPGSSVKLSCKASGYTFTSYWMHWVKQRPIQGLEWIGNIDPS | 97 | 97 |
| DSETHYNQKFKDKATLTVDKSSSTAYMQLSSLTSEDSAVYYCARDYYGSYWYFDV | | |
| WGTGTTVTVSSGGGGSGGGGSGGGGSDIQMTQTTSSLSASLGDRVTISCSASQG | | |
| ISNYLNWYQQKPDGTVKLLIYYTSSLHSGVPSRFSGSGSGTDYSLTISNLEPEDIATY | | |
| YCQQYSKLPYTFGGGTKLEIKR | | |
| EVQLQQSGAELVKPGASVKLSCTASGFNIKDYYMHWVKQRTEQGLEWIGRIDPE | 98 | 98 |
| DGETKYAPKFQGKATITADTSSNTAYLQLSSLTSEDTAVYYCAAYGNSAWFAYWG | | |
| QGTLVTVSAGGGGSGGGGSGGGGSDIVMTQSPATLSVTPGDRVSLSCRASQSIS | | |
| DYLHWYQQKSHESPRLLIKYASQSISGIPSRFSGSGSGSDFTLSINSVEPEDVGVYYC | | |
| QNGHSFPWTFGGGTKLEIKR | | |
| QVQLQQSGPELKKPGETVKISCKASGYTFTNYGMNWVRQAPGKGLEWMGWIN | 99 | 99 |
| TNTGEPTYAEEFKGRFAFSLETSASTAYLQINNLRNEDTATYFCARWYPYFDYWGQ | | |
| GTTVTVSSGGGGSGGGGSGGGGSEIQMTQSPSSMSASLGDRITITCQATQDIVKN | | |
| LNWYQQKPGKPPSFLIYYATELAEGVPSRFSGSGSGSDYTLTISNLESEDFATYYCLQ | | |
| FYEFPYTFGGGTKLEIKR | | |
| QVQLQQSGPELKKPGETVKISCKASGYTFTNYGMNWVKQAPGKGLKWMGWIN | 100 | 100 |
| TNTGEPTYAEEFKGRFAFSLETSASTAYLQINNLKNEDTATYFCARWYPYFDYWGQ | | |
| GTTLTVSSGGGGSGGGGSGGGGSEIQMTQSPSSMSASLGDRITITCQATQDIVKN | | |
| LNWYQQKPGKPPSFLIYYATELAEGVPSRFSGSGSGSDYSLTISNLESEDFADYYCL | | |
| QFYEFPYTFGGGTKLEIKR | | |
| QVQLQQSGAELAKPGASVKLSCKASGYTFTSYWMHWVKQRPGQGLEWIGYINP | 101 | 101 |
| SSGYTKYNQKFKDKATLTADKSSSTAYMQLSSLTYEDSAVYYCARSDGSSGNWYF | | |
| DVWGTGTTVTVSSGGGGSGGGGSGGGGSDIQMTQSPASLSASVGETVTITCRAS | | |
| GNIHNYLAWYQQKQGKSPQLLVYNAKTLADGVPSRFSGSGSGTQYSLKINSLQPE | | |
| DFGSYYCQHFWSTPWTFGGGTKLEIKR | | |
| QVQLKESGPGLVAPSQSLSITCTVSGFSLTSYGVHWVRQPPGKGLEWLGVIWAG | 102 | 102 |
| GSTNYNSALMSRLSISKDNSKSQVFLKMNSLQTDDTAMYYCAREGGYTGYFDVW | | |
| GAGTTVTVSSGGGGSGGGGSGGGGSQAVVTQESALTTSPGGTVILTCRSSTGAVT | | |
| TSNYANWVQEKPDHLFTGLIGGTSYRAPGVPVRFSGSLIGDKAALTITGAQTEDDA | | |
| MYFCALWYSTHYVFGGGTKVTVLR | | |
| QVQLQQPGAELVRPGSSVKLSCKASGYTFTSYWMHWVKQRPIQGLEWIGNIDPS | 103 | 103 |
| DSETHYNQKFKDKATLTVDKSSSTAYMQLSSLTSEDSAVYYCAYSNYVPYYAMDY | | |
| WGQGTSVTVSSGGGGSGGGGSGGGGSDIQMTQSPSSLSASLGERVSLTCRASQE | | |
| ISGYLSWLQQKPDGTIKRLIYAASTLDSGVPKRFSGSRSGSDYSLTISSLESEDFADYY | | |
| CLQYASYPWTFGGGTKLEIKR | | |
| QVQLQQPGAELVKPGASVKLSCKASGYTFTSYWMHWVKQRPGQGLEWIGMIH | 104 | 104 |
| PNSGSTNYNEKFKSKATLTVDKSSSTAYMQLSSLTSEDSAVYYCARDYGNYDYAM | | |
| DYWGQGTSVTVSSGGGGSGGGGSGGGGSDIVMTQSPATLSVTPGDRVSLSCRA | | |
| SQSISDYLHWYQQKSHESPRLLIKYASQSISGIPSRFSGSGSGSDFTLSINSVEPEDV | | |
| GVYYCQNGHSFPYTFGGGTKLEIKR | | |
| EVQLQQSGAELVRPGALVKLSCKASGFNIKDYFMHWVKQRPEQCLEWIGWIDPE | 105 | 105 |
| TDNTIYDPKFQGKASITADTSSNTAYLQLSSLTSEDTAVYYCARSGNMGFTYWGQ | | |
| GTLVTVSAGGGGSGGGGSGGGGSENVLTQSPAIMSASLGEKVTMSCRASSSVNY | | |
| MYWYQQKSDASPKLWIYYTSNLAPGVPARFSGSGSGNSYSLTISSMEGEDAATYY | | |
| CQQFTSSPSTFGCGTKLEIKR | | |
| EVMLVESGGGLVKPGGSLKLSCAASGFTFSSYAMSWVRQTPEKCLEWVATISSGG | 106 | 106 |
| SYTYYPDSVKGRFTISRDNAKNTLYLQMSSLRSEDTAMYYCASQGGSSWGAMDY | | |
| WGQGTSVTVSSGGGGSGGGGSGGGGSETTVTQSPASLSMAIGEKVTIRCITNTDI | | |
| DDDMNWYQQKPGEPPKLLISEGNTLRPGVPSRFSSSGYGTDFVFTIENMLSEDVA | | |
| DYYCLQSDNLPLTFGCGTKLELKR | | |
| QVQLKQSGPGLVQPSQSLSITCTVSGFSLTSYGVHWVRQSPGKCLEWLGVIWSG | 107 | 107 |
| GSTDYNAAFISRLSISKDNSKSQVFFKMNSLQADDTAIYYCARKGYGYDWYFDVW | | |
| GTGTTVTVSSGGGGSGGGGSGGGGSQLVLTQSSSASFSLGASAKLTCTLSSQHSTY | | |
| TIEWYQQQPLKPPKYVMELKKDGSHSTGDGIPDRFSGSSSGADRYLSISNIQPEDE | | |
| AIYICGVGDTIKEQFVYVFGCGTKVTVLG | | |
| QVQLQQPGAELVMPGASVKLSCKASGYTFTSYWMHWVKQRPGQCLEWIGEIDP | 108 | 108 |
| SDSYTNYNQKFKGKATLTVDKSSSTAYMQLSSLTSEDSAVYYCARSSYYYYAMDY | | |
| WGQGTSVTVSSGGGGSGGGGSGGGGSQIVLTQSPAIMSASPGEKVTMTCSASSS | | |
| VSYMHWYQQKSGTSPKRWIYDTSKLASGVPARFSGSGSGTSYSLTISSMEAEDAA | | |
| TYYCQQWSSNPLTFGCGTKLELKR | | |
| QVQLQQSGAELMKPGASVKISCKATGYTFSSYWIEWVKQRPGHGLEWIGEILPGS | 109 | 109 |
| GSTNYNEKFKGKATFTADTSSNTAYMQLSSLTSEDSAVYYCARRAYGYDGGFDYW | | |
| GQGTTLTVSSGGGSGGGGSGGGGSDIKMTQSPSSMYASLGERVTITCKASQDINS | | |
| YLSWFQQKPGKSPKTLIYRANRLVDGVPSRFSGSGSGQDYSLTISSLEYEDMGIYYC | | |
| LHYDEFPPTFGAGTKLELK | | |
| QVQLQQSGAELMKPGASVKISFKATGYTFSSYWIEWVKQRPGHGLEWIGEILPGS | 110 | 110 |
| GSTNYIEKFKGKATFTADTSSNTAYMQLSSLTSEDSAVYYCARRAYGYDEGFDYW | | |
| GQGTTLTVSSGGGSGGGGSGGGGSDIKMTQSPSSMYASLGERVTITCKASQDINS | | |
| YLNWFQQKPGKSPKTLIYRANRLVDGVPSRFSGSGSGQDYSLTISSLEYEDMGIYYC | | |
| LQYDEFPPTFGAGTKLELK | | |
| QVQLQQSGAELMKPGASVKISCKATGYTFSSYWIEWVKQRPGHGLEWIGEILPGS | 111 | 111 |
| DSTSYNEKFKGKTTFTADTSSNTAYMQLSSLTSEDSAVYYCARRAYGYDEGFDYW | | |
| GQGTTLTVSSGGGSGGGGSGGGGSDIKMTQSPSSMYASLGERVTITCKASQDINS | | |
| YLSWFQQKPGKSPKTLIYRANRLVDGVPSRFSGSGSGQDYSLTISSLEYEDMGIYYC | | |
| LQYDEFPPTFGAGTKLELK | | |
| QVQLQQSGAELMKPGASVKISCKATAYTFSIYWIEWVKQRPGHGLEWIGEILPGS | 112 | 112 |
| GSTNYNEKVKGKATFTADTSSNTAYMQLSSLTSEDSAVYYCARRAYGYDGGFDY | | |
| WGQGTTLTVSSGGGSGGGGSGGGGSDIKMTQSPSSMYASLGERVTITCKASQDI | | |
| NSYLSWFQQKPGKSPKTLIYRANRLVDGVPSRFSGSGSGQDYSLTISSLEYEDMGIY | | |
| YCLQYDEFPPTFGAGTKLELK | | |
| QVQLQQSGAELMKPGASVKISCKATGYTFSSYWIEWVKQRPGHGLEWIGEILPGS | 113 | 113 |
| GSTNYNEKFKGKATFTADTSSNTAYMQLSSLTSEDSAVYYCARRGYGYDEGFDYW | | |
| GQGTTLTVSSGGGSGGGGSGGGGSDIKMTQSPSSMYASLGERVTITCKASQDINS | | |
| YLSWFQQKPGKSPKTLIYRANRLVDGVPSRFSGSGSGQDYSLTISSLEYEDMGIYYC | | |
| PQYVESPPTFGAGTKLELK | | |
| QVQLQQSGAELMKPGASVKISCKATGYTFSSYWIEWVKQRPGHGLEWIGEILPGS | 114 | 114 |
| GSTNYNEKFKGKATFTADTSSNTAYMQLSSLTSEDSAVYYCARRGYGYDEGFDYW | | |
| GQGTTLTVSSGGGSGGGGSGGGGSDIKMTQSPSSMYASLGERVTITCKASQDINS | | |
| YLSWFQQKPGKSPKTLIYRANRLVDGVPSRFSGSGSGQDYSLTISSLEYEDMGIYYC | | |
| LQYDEFPPTFGAGTKLELK | | |
| QVQLQQSGAELMKPGASVKMSCKATGYTFSNYWIEWVKQRPGHGLEWIGEILP | 115 | 115 |
| GSGSTSYNEKFKGKATFTADTSSSTAYMQLSSLTSEDSAVYYCARRGYGYDEGFDY | | |
| WGQGSTLTVSSGGGSGGGGSGGGGSDIKMTQSPSSMYASLGERVTITCKASQDI | | |
| NSYLSWFQQKPGKSPKTLIYRANRLVDGVPSRFSGSGSGQDYSLTISSLEYEDMGIY | | |
| YCLQYDEFPPTFGAGTKLELK | | |
| QVQLQQSGAELMKPGASVKISCKATGYTFSSYWIEWVQQRPGHGLEWIGEILPG | 116 | 116 |
| SGYTSYIEQFKGKATFTADTSSNTAYMQLGSLTSEDSAVYYCARRGYGYDEGFDY | | |
| WGQGTTLTVSSGGGSGGGGSGGGGSDIKMTQSPSSMYASLGERVTITCKASQDI | | |
| NSYLSWFHQKPGKSPKTLIYRANRLVDGVPSRFSGSGSGQDYSLTISSLEYEDMGIY | | |
| YCLQYDEFPPTFGAGTKLELK | | |
| QVQLQQSGAELMKPGASVKISCKATGYTFSSYWIEWVKQRPGHGLEWIGEILPGS | 117 | 117 |
| GSTSYNEKFKDKATFTADTSSNTAFMQLSSLTSEDSAVYYCARRAYGYDEGFDYW | | |
| GQGTTLTVSSGGGSGGGGSGGGGSDIKMTQSPSSMYASLGERVTITCKASQDINS | | |
| YLSWFQQKPGKSPKTLIYRANRLVDGVPSRFSGSGSGQDYSLTISSLEYEDMGIYYC | | |
| LQYDEFPLTFGGGTKLEIK | | |
| QVQLQQSGAELMKPGASVKISCKATGYTFSSYWIEWVKQRPGHGLEWIGEVLPG | 118 | 118 |
| SGSTSYNEKFKGKATFTADTSSNTAYMQLSSLTSEDSAVYYCARRAYGYDEGFDY | | |
| WGQGTTLTVSSGGGSGGGGSGGGGSDIKMTQSPSSMYASLGERVTITCKASQDI | | |
| NGYLSWFQQKPGKSPQTLLYRANRLVDGVPSRFRGSGSGQDYSLTISSLEYEDMGI | | |
| YYCLQYDEFPPTFGAGTKLELK | | |
| QVQLQQSGAELMKPGASVKISCKGTGYTFSSYWIEWVKQRPGHGLEWIGEISPGS | 119 | 119 |
| GSTNYNEKFKGKATFTADTSSNTAYMQLSSLTSEDSAVYYCARRGYGYDEGFDYW | | |
| GQGTTLTVSSGGGSGGGGSGGGGSDIKMTQSPSSMYASLGERVTITCKASQDINS | | |
| YLSWFQQKPGKSPKTLIYRANRLVDGVPSRFSGSGSGQDYSLTISSLEYEDMGIYYC | | |
| LQYDEFPPTFGAGTKLELK | | |
| QVQLQQSGAELMKPGASVKISCKATGYTFGTYWIEWVKQRPGHGLEWIGEILPG | 120 | 120 |
| SGTPNYNEKFKGKATFTADTSSNTAYMQLSSLTSEDSAVYYCARRAYGYDAGFDY | | |
| WGQGTTLTVSSGGGSGGGGSGGGGSDIKMTQSPSSMYASLGERVTITCKASQDI | | |
| NSYLSWFQQKPGKSPKTLIYRANRLVDGVPSRFSGSGSGQDYSLTISSLEYEDMGF | | |
| YYCLQYDEFPPTFGAGTKLELK | | |
| QVQLQQSGAELMKPGASVKISFKATGYTFSSYWIEWVKQRPGHGLEWIGEILPGS | 121 | 12. |
| GSTSCNEKFKGKATFTADTSSNTAYMQLSSLTSEDSAVYYCARRGYGYDEGFDYW | | |
| GQGTTLTVSSGGGSGGGGSGGGGSDIKMTQSPSSIYASLGERVTITCKASQDINSY | | |
| LNWFQQKPGKSPKTLIYRANRLVDGVPSRFSGSGSGQDYSLTISSLEYEDMGIYYCL | | |
| QYDEFPPTFGVGTKLELK | | |
| QVQLQQSGAELMKPGASVKISCKATGYTFSSYWIEWVKQRPGHGLEWIGEILPGS | 122 | 122 |
| GRTSYIEKFKGKATFTADTSSNTAYMQLSSLTSEDSAVYYCARRGYGYDEGFDYWG | | |
| QGTTLTVSSGGGSGGGGSGGGGSDIKMTQSPSSMYASLGERVTITCKASQDINSY | | |
| LSWFQQKPGKSPKTLIYRANRLVDGVPSRFSGSGSGQDYSLTISSLEYEDMGIYYCL | | |
| QYDEFPPTFGAGTKLELK | | |
| QVQLQQSGAELMKPGASVKISCKATGYTFSSYWIEWVKQRPGHGLEWIGEILPGS | 123 | 123 |
| GRTSYIEKFKGKATFTADTSSNTAYMQLSSLTSEDSAVYYCARRGYGYDEGFDYWG | | |
| QGTTLTVSSGGGSGGGGSGGGGSDIKMTQSPSSMYASLGERVTITCKASQDINSY | | |
| LSWFQQKPGKSPKTLIYRAKRLVDGVPSRFSGSGSGQDYSLTISSLEYEDMGIYYCL | | |
| QYDEFPPTFGAGTKLELK | | |
| QVQLKQSGPGLVQPSQSLSITCTVSGFSLSSYGVHWVRQSPGKALEWLGVIWRG | 124 | 124 |
| GSTDYNAAFMSRLSITKDNSKSQVFFKMNSLQADDTAIYYCAKNLYGHYVMDYW | | |
| GQGTSVTVSSGGGSGGGGSGGGGSDIKMTQSPSSMYASLGERVTITCKASQDIN | | |
| SYLSWFQQKPGKSPKTLIYRANRLVDGVPSRFSGSGSGQDYSLTISSLEYEDMGIYY | | |
| CLQYDEFPPTFGAGAKLELK | | |
| QVQLKQSGPGLVQPSQSLSITCTVSGFSVTSYGVHWVRQSPGKGLEWLGVIWRG | 125 | 125 |
| GSTDYNAAFMSRLSITKDNSKSQVFFKMNSLQADDSAIYYCAKNLYGHYVMDYW | | |
| GQGTSVTVSSGGGSGGGGSGGGGSNIVMTQSPKSMSMSVGERVTLSCKASENV | | |
| VTYVSWYQQKPEQSPKLLIYGASNRYTGVPDRFTGSGSATDFTLTISSVQAEDLAD | | |
| YHCGQSYSYPFTFGSGTKLEIK | | |
| QVQLKQSGPGPVQPSQSLSITCTVSGFSLTSYGVHWVRQSPGKGLEWLGVIWRG | 126 | 126 |
| GSTDNNAAFMSRLSITKDNSKSQVFFKMNSLQADDTAIYYCAKNLYGHYVMDYW | | |
| GQGTSVTVSSGGGSGGGGSGGGGSNIVMTQSPKSMSMSVGERVTLSCKASENV | | |
| VTYVSWYQQKPEQSPKLLIYGASNRYTGVPDRFTGSGSATDFTLTISSVQAEDLAD | | |
| YHCGQSYSYPFTFGSGTKLEIK | | |
| QVQLKQSGPGLVQPSQSLSITCTVSGFSLTRYGVHWVRQSPGKGLEWLGVIWRG | 127 | 127 |
| GSTDHNAAFMSRLSITKDNSKSQVFFKMNSLQADDTAIYYCAKNLYGHYVMDYW | | |
| GQGTSVTVSSGGGSGGGGSGGGGSNIVMTQSPKSMSMSVGERVTLSCKASENV | | |
| VTYVSWYQQKPEQSPKLLIYGASNRYTGVPDRFTGSGSATDFTLTISSVQAEDLAD | | |
| YHCGQSYSYPFTFGSGTKLEIK | | |
| QVQLKQSGPGLVQPSQSLSITCTVSGFSVTTYGVHWVRQSPGKGLEWLGVIWRG | 128 | 128 |
| GSTDYNAAFMSRLSITKDNSKSQVFFKMNSLQADDTAIYYCAKNLYGHYVMDYW | | |
| GQGTSVTVSSGGGSGGGGSGGGGSNIVMTQSPKSMSMSVGERVTLSCKASENV | | |
| VTYVSWYQQKPEQSPKLLIYGASNRYTGVPDRFTGSGSATDFTLTISSVQAEDLAD | | |
| YHCGQSYSYPFTFGSGTKLEIK | | |
| QVQLKQSGPGLVQPSQSLSITCTVSGFSVTSYGVHWVRQSPGKGLEWLGVIWRG | 129 | 129 |
| GSTDYNAAFMSRLSITKDNSKSQVFFKMNSLQADDTAIYYCAKNLYGHYVMDYW | | |
| GQGTSVTVSSGGGSGGGGSGGGGSNIVMTQSPKSMSMSVGERVTLSCKASENV | | |
| VTYVSWYQQKPEQSPKLLIYGASNRYTGVPDRFTGSGSATDFTLTISSVQAEDLAD | | |
| YHCGQSYSYLIHVRFGSGTKLEIK | | |
| QVQLKQSGPGLVQPSQSLSITCTVSGFSLTRYGVHWVRQSPGKGLEWLGVIWRG | 130 | 130 |
| GSTDHNAAFMSRLSITKDNSKSQVFFKMNSLQADDTAIYYCAKNLYGHYVMDYW | | |
| GQGTSVTVSSGGGSGGGGSGGGGSNIVMTQSPKSMSMSVGERVTLSCKASENV | | |
| VTYVSWYQQKPEQSPKLLIYGASNRYTGVPDRFTGSGSATDFTLTISSVQAEDLAD | | |
| YHCGQSYSYLIHVRFGSGTKLEIK | | |
| QVQLQQPGAELVKPGASVKLSCKASGYTFTSYWMHWVKQRPGQGLEWIGMIH | 131 | 131 |
| PNSGSTNYNEKFKSKATLTVDKSSSTAYMQLSSLTSEDSAVYYCARWGDGYSFAY | | |
| WGQGTLVTVSAGGGSGGGGSGGGGSQIVLTQSPAIMSASPGEKVTMTCSASSSV | | |
| SYMHWYQQKSGTSPKRWIYDTSKLASGVPARFSGSGSGTSYSLTISSMEAEDAAT | | |
| YYCQQWSSNPLYTFGGGTKLEIK | | |
| QVQLQQPGAELVKPGASVKLSCKASGYTFTSYWMHWVKQRPGQGLEWIGMIH | 132 | 132 |
| PNSGSTNYNEKFKSKATLTVDKSSSTAYMQLSSLTSEDSAVYYCARWGDGYSFAY | | |
| WGQGTLVTVSAGGGSGGGGSGGGGSQIVLTQSPAIMSASPGEKVTMTCSASSSV | | |
| SYMHWYQQKSGTSPKRWIYDTSKLASGVPARFSGSGSGTSYSLTISSMEAEDAAT | | |
| YYCQQWSSNPHVHVFGGGTKLEIK | | |
| QVQLQQPGAELVKPGASVKLSCKASGYTFTTYWMHWVKQRPGQGLEWIGMIH | 133 | 133 |
| PNSDNTNYNEKFKSKATLTVDKSSSTAYIQLSSLTSEDSAVYYCARWGDGYSFAYW | | |
| GQGTLVTVSAGGGSGGGGSGGGGSQIVLTQSPAIMSASPGEKVTMTCSASSSVS | | |
| YMHWYQQKSGTSPKRWIYDTSKLASGVPARFSGSGSGTSYSLTISSMEAEDAATY | | |
| YCQQWSSNPLYTFGGGTKLEIK | | |
| QVQLQQPGAELVKPGASVKLSCKASGYTFTSYWMHWVKQRPGQGLEWIGMIH | 134 | 134 |
| PNSGNTNYNEKFKSKATLTVDKSSSTAYMQLSSLTSEDSAVYYCARWGDGYSFAY | | |
| WGQGTLVTVSAGGGSGGGGSGGGGSQIVLTQSPAIMSASPGEKVTMTCSASSSV | | |
| SYMHWYQQKSGTSPKRWIYDTSKLASGVPARFSGSGSGTSYSLTISSMEAEDAAT | | |
| YYCQQWSSNPLYTFGGGTKLEIK | | |
| QVQLKQSGPELVKPGASVKMSCKASGYTFTDYVINWVKQRTGQGLEWIGEIYPG | 135 | 135 |
| SGSTYYNEKFKGKATLTADKSSNTVYMQLSSLTSEDSAVYFCARRGERGPWFAYW | | |
| GQGTLVTVSAGGGSGGGGSGGGGSDIVLTQSPASLAVSLGQRATISCKASQSVDY | | |
| DGDSYMNWYQQKPGQPPKLLIYAASNLESGIPARFSGSGSGTDFTLNIHPVEEED | | |
| AATYYCQQSNEDPLTFGAGTKLELK | | |
| QVQLKQSGPELVKPGASVKMSCKASGYTFTDYVINWVKQRTGQGLEWIGEIYPG | 136 | 136 |
| SGSSYYNEKFKGKATLTADKSSNTAYMQLSSLTSEDSAVYFCARRGERGPWFAYW | | |
| GQGTLVTVSAGGGSGGGGSGGGGSDIVLTQSPASLAVSLGQRATISCKASQSVDY | | |
| DGDSYMNWYQQKPGQPPKLLIYAASNLESGIPARFSGSGSGTDFTLNIHPVEEED | | |
| AATYYCQQSNEDPLTFGAGTKLELK | | |
| QVQLKQSGPELVKPGASVKMSCKASGYTFTDYVINWVKQRTGQGLEWIGEIYPG | 137 | 137 |
| SGSSYYNEKFRGKATLTADKSSNTAYMQLSSLTSEDSAVYFCARRGERGPWFAYW | | |
| GQGTLVTVSAGGGSGGGGSGGGGSDIVLTQSPASLAVSLGQRATISCKASQSVDY | | |
| DGDSYMNWYQQKPGQPPQLLIYAASNLQSGIPARFSGSGSGTDFTLNIHPVEEED | | |
| AATYYCQQSNEDPLTFGAGTKLELK | | |
| QVQLKQSGPELVKPGASVKMSCKASGYTFTDYVINWVKQKTGQGLEWIGEIYPG | 138 | 138 |
| SGSSYYNEKFKGKATLTADKSSNTAYIQLSSLTSEDSAVYFCARRGERGPWFAYWG | | |
| QGTLVTVSAGGGSGGGGSGGGGSDIVLTQSPASLAVSLGQRATISCKASQSVDYD | | |
| GDSYMNWYQQKPGQPPKLLIYAASNLESGIPARFGGSGSGTDFTLNIHPVEEEDA | | |
| ATYYCQQSNEDPLTFGAGTKLELK | | |
| QVQLQQPGAELVRPGASVKLSCKASGYTFTNYWMNWVKQRPGQGLEWIGMID | 139 | 139 |
| PSDSETHYNQMFKDKATLTVDKSSSTAYMQLSSLTSEDSAVYYCATYDGYYRFAY | | |
| WGQGTLVTVSAGGGSGGGGSGGGGSDIQMTQSPSSLSASLGGKVTITCKASQDI | | |
| NKYIAWYQHKPGKGPRLLIHYTSTLQPGIPSRFSGSGSGRDYSFSISNLEPEDIATYY | | |
| CLQYDILMYTFGGGTKLEIK | | |
| QVQLQQPGAELVRPGASVRLSCKASGYTFTNYWMNWVKQRPGQGLEWIGMID | 140 | 140 |
| PSDSETHFNQMFKDKATLTVDKSSSTAYMQVSSLTSEDSAVYYCATYDIYYRFAYW | | |
| GQGTLVTVSAGGGSGGGGSGGGGSDIQMTQSPSSLSASLGGKVTITCKASQDINK | | |
| YIAWYQHKPGKGPRLLIHYTSTLQPGIPSRFSGSGSGRDYSFSISNLEPEDIATYYCL | | |
| QYDILMYTFGGGTKLEIK | | |
| QVQLQQPGAELVKPGASVKLSCKASGYTFTSYWMHWVKQRPGQGLEWIGMIH | 141 | 141 |
| PNSDSTNYNEKFKSKATLTVDKSSSTAYMHLSSLTSEDSAVYYCARPGGYGFADW | | |
| GQGTLVTVSAGGGSGGGGSGGGGSEIQMTQSPSSMSASLGDRITITCQATQDIV | | |
| KNLNWYQQKPGKPPSFLIYYATELAEGVPSRFSGSGSGSDYSLTISNLESEDFADYY | | |
| CLQFYEFPLTFGAGTKLELK | | |
| QVQLQQPGAELVKPGASVKLSCKASGYTFTTYWMHWVKQRPGQGLEWIGMIH | 142 | 142 |
| PNSGSTNYNEKFKSKATLTVDKSSSTAYMQLSSLTSEDSAVYYCARPGGYGFTYWG | | |
| QGTLVTVSAGGGSGGGGSGGGGSEIQMTQSPSSMSASLGDRITITCQATQDIVK | | |
| NLNWYQQKPGKPPSFLIYYATELAEGVPSRFSGSGSGSDYSLTISNLESEDFADYYC | | |
| LQFYEFPLTFGAGTKLELK | | |
| QVQLQQPGAELVKPGASVKLSCKASGYTFTSYWMHWVKQRPGQGLEWIGMIH | 143 | 143 |
| PNSGSPNYNEKFKSKATLTVDKSSSTAYMQLSSLTSEDSAVYYCARPGGYGFAYW | | |
| GQGTLVTVSAGGGSGGGGSGGGGSEIQMTQSPSSMSASLGDRITITCQATQDIV | | |
| KNLNWYQQKPGKPPSFLIYYATELAEGVPSRFSGSGSGSDYSLTISNLESEDFADYY | | |
| CLQFYEFPLTFGAGTKLELK | | |
| QVQLQQPGAELVRPGASVKLSCKASGYTFTSYWINWVKQRPGQGLEWIGNIYPS | 144 | 144 |
| DSYTNYNQKFKDKATLTVDKSSSTAYMQLSSPTSEDSAVYYCTRGNYIDYWGQGT | | |
| TLTVSSGGGSGGGGSGGGGSENVLTQSPAIMSASLGEKVTMSCRASSSVNYMY | | |
| WYQQKSDASPKLWIYYTSNLAPGVPARFSGSGSGNSYSLTISSMEGEDAATYYCQ | | |
| QFTSSHTFGGGTKLEIK | | |
| QVQLQQPGAELVRPGASVKLSCKASGYTFTDYWINWVKQRPGQGLEWIGNIYPS | 145 | 145 |
| DSYTNYNQKFKDKATLTVDKSSSTAYMQLSSPTSEDSAVYYCTRGNYIDYWGQGT | | |
| TLTVSSGGGSGGGGSGGGGSENVLTQSPAIMSASLGEKVTMSCRASSSVNYMY | | |
| WYQQKSDASPKLWIYYTSNLAPGVPARFSGSGSGNSYSLTISSMEGEDAATYYCQ | | |
| QFTSSHTFGGGTKLEIK | | |
| QVQLQQSGPELVKPGASVKMSCKASGYTFTDYVISWVKQRTGQGLEWIGEIYPG | 146 | 146 |
| SGSSYYNEKFKGKATLTADKSSNTAYMQLSSLTSEDSAVYFCARPGDLGFAYWGQ | | |
| GTLVTVSAGGGSGGGGSGGGGSDIVLTQSPASLAVSLGQRATISCKASQSVDYDG | | |
| DSYMNWYQQKPGQPPKLLIYAASNLESGIPARFSGSGSGTDFTLNIHPVEEEDAAT | | |
| YYCQQSNKDPLTFGAGTKLELK | | |
| QVQLQQSGPELVKPGASVKMSCKASGYTFTDYVISWVKQRTGQGLEWIGEIYPG | 147 | 147 |
| SGSNYYNEKFKGKAIMTADKSSNTAYMQLSSLTSEDSAVYFCARPGDLGFAYWG | | |
| QGTLVTVSAGGGSGGGGSGGGGSDIVLTQSPASLAVSLGQRATISCKASQSVDYD | | |
| GDSYMNWYQQKPGQPPKLLIYAASNLESGIPARFSGSGSGTDFTLNIHPVEEEDA | | |
| ATYYCQQSNEDPLTFGAGTKLELK | | |
| QVQLQQSGPELVKPGASVKMSCKASGYTFTDYVISWVKQRTGQGLEWIGEIYPG | 148 | 148 |
| SGSSYYNEKFKGKATLTADKSSNTAYMQLSSLTSEDSAVYFCARPGDLGFAYWGQ | | |
| GTLVTVSAGGGSGGGGSGGGGSDIVLTQSPASLAVSLGQRATISCKASQSVDYDG | | |
| DSYMNWYQQKPGQPPKLLIYAASNLESGIPARFSGSGSGTDFTLNIHPVEEEDAAT | | |
| YYCQQSNKDPFTFGAGTKLELK | | |
| QVQLKESGPGLVAPSQSLSITCTVSGFSLTNYGVHWVRQPPGKGLEWLGVVWAG | 149 | 149 |
| GITNYNWALMSRLSISKDNSKSQVFLKMNSLQTDDTAMYYCARGDGYDDGYAM | | |
| DYWGQGTSVTVSSGGGSGGGGSGGGGSDIVLTQSPASLAVSLGQRATISCRASQ | | |
| SVSTSSYSYMHWYQQKPGQAPKLLIKYASNLESGVPARFSGSGSGTDFTLNIHPVE | | |
| EEDTATYYCQHSWEIPLTFGAGAKLELK | | |
| QVQLKESGPGLVAPSQSLSITCTVSGFSLTSYGVHWVRQPPGKGLEWLGVLWAG | 150 | 150 |
| GITNYNSALMSRLSIRKDNSKSQVFLKMYSLHTDDTAMYYCARGDGYDDGYAMD | | |
| YWGQGTSVTVSSGGGSGGGGSGGGGSDIVLTQSPASLAVSLGQRATISCRASQS | | |
| VSTSSYSYMHWYQQKPGQPPKLLIKYASNLESGVPARFSGSGSGTDFTLNVHPVE | | |
| EEDTATYYCQHSWEIPLTFGAGTKLELK | | |
| QVQLQQSGPQLVSPGASVKISCKASGYSFTSYWMYWVKQRPGQGLEWIGMIDP | 151 | 151 |
| SDSETRLNQKFKDRATLTVDKSSSTAYMQLSSPTSEDSAVYYCARTRNYWGQGTT | | |
| LTVSSGGGSGGGGSGGGGSDIQMTQTPSSLSASLGDRVTISCRASQDISNYLNWY | | |
| QQKPDGTVKLLIYSTSRLHSGVPSRFSGSGSGTDYSLTISNLEQEDIATYFCQQGNTL | | |
| PWTFGGGTKLEIK | | |
| QVQLQQSGPQLVSPGASVKISCKASGYSFTSYWMYWVKQRPGQGLEWIGMIDP | 152 | 152 |
| SDSETRLNQKFKDKATLTVDKSSSTAYMQLSSPTSEDSAVYYCARTRNYWGQGTT | | |
| LTVSSGGGSGGGGSGGGGSDIQMTQTPSSLSASLGDRVTISCRASQDISNYLNWY | | |
| QQKPDGTVKLLIYSTSRLHSGVPSRFSGSGSGTDYSLTISNLEQEDIATYFCQQGNA | | |
| LPWTFGGGTKLEIK | | |
| QVQLQQSGPQLVSPGASVKISCKASGYSFTSYWMYWVKQRPGQGLEWIGMIDP | 153 | 153 |
| SDSETRLNQKFKDKATLTVDKSSSTAYMQLSSPTSEDSAVYYCARTRNYWGQGTS | | |
| LTVSSGGGSGGGGSGGGGSDIQMTQTPSSLSASLGDRVTISCRASQDISNYLNWY | | |
| QQKPDGTVKLLIYSTSRLHSGVPSRFSGSGSGTDYSLTISNLEQEDIATYFCQQGNTL | | |
| PWTFGGGTKLEIK | | |
| EVQLQQSGAELVRSGASVKLSCTASGFNIKDYYMHWVKQRPEQGLEWIGWIDPE | 154 | 154 |
| NGDTEYAPKFQGKATMTADTSSNTAYLQLSSLTSEDTAVYYCNAPLLRYSSAMDY | | |
| WGQGTSVTVSSGGGSGGGGSGGGGSQAVVTQESALTTSPGGTVILTCRSSTGAV | | |
| TTSNYANWVQEKPDHLFTGLIGGTSNRAPGVPVRFSGSLIGDKAALTITGAQTEDD | | |
| AMYFCALWYSTHYVFGGGTKVTVL | | |
| EVQLQQSGAELVRSGASVKLSCTASGFNIKDYYIHWVKQRPEQGLEWIGWIDPEN | 155 | 155 |
| GDTEYAPKFQGKATMTADTSSNTAYLQLSSLTSEDTAVYYCNAPLLRYSSSMDYW | | |
| GQGTSVTVSSGGGSGGGGSGGGGSQAVVTQESALTTSPGGTVILTCRSSTGAVTT | | |
| SNYANWVQEKPDHLFTGLIGGTSNRAPGVPVRFSGSLIGDKAALTITGAQTEDDA | | |
| MYFCALWYSTHYVFGGGTKVTVL | | |
| EVQLQQSGAELVRSGASVKLSCTASGFNIKDYYMHWVKQRPEQGLEWIGWIDPE | 156 | 156 |
| NGDTEYAPKFQGKATMTADTSSNTAYLQLSSLTSEDTAVYYCNVALLRYSSAMDY | | |
| WGQGTSVTVSSGGGSGGGGSGGGGSQAVVTQESALTTSPGGTVILTCRSSTGAV | | |
| TTSNYANWVQEKPDHLFTGLIGGTSNRAPGVPVRFSGSLIGDKAALTITGAQTEDD | | |
| AMYFCALWYSTHYVFGGGTKVTVL | | |
| QVQLQQSGAELVKPGASVKLSCKASGYTFSNYYVYWVKQRPGQGLEWIGEINPS | 157 | 157 |
| NGDTNFNEKFKSKATLTVDKSSSTAYMQLSSLTSEDSAVYFCTSYYTHEAYYYAMD | | |
| CWGQGTSVTVSSGGGSGGGGSGGGGSETTVTQSPASLSVATGEKVTIRCITSTDI | | |
| DDDMNWYQQKPGEPPKLLISEGNTLRPGVPSRFSSSGYGTDFVFTIENTLSEDVA | | |
| DYYCLQSDNMPFTFGSGTKLEIK | | |
| QVQLQQSGAELVRPGASVKLSCTASGFNIKDYYMHWVKQRPEQGLEWIGRIDPE | 158 | 158 |
| DGDTEYAPKFQGKATMTADTSSNTAYLQLSSLTSEDTAVYYCTPYSIYDAMDYWG | | |
| QGTSVTVSSGGGSGGGGSGGGGSQAVVTQESALTTSPGGTVILTCRSSTGAVTTS | | |
| NYANWVQEKPDHLFTGLIGGTSNRAPGVPVRFSGSLIGDKAALTITGAQTEDDAM | | |
| YFCALWYSTHYFGGGTKVTVL | | |
| QVQLQQSGPELVKPGASVKMSCKASGYTFTDYVISWVKQRTGQGLEWIGEIYPG | 159 | 159 |
| SGSTYYNEKFKGKATLTADKSSNTAYMQLSSLTSEDSAVYFCARRGERGPWFAYW | | |
| GQGTLVTVSAGGGSGGGGSGGGGSDIVLTQSPASLAVSLGQRATISCKASQSVDY | | |
| DGDSYMNWYQQKPGQPPKLLIYAASNLESGIPARFSGSGSGTDFTLNIHPVEEED | | |
| AATYYCQQSNEDPLTFGAGTKLELK | | |
| QVQLQQSGAELVRPGVSVKISCKGSGYSFTDYGMHWVKQSHAKSLEWIGVISTYY | 160 | 160 |
| GDASYNQKFKGKATMTVDKSSSTAYMELARLTSEDSAIYYCARQMDYDYTYYYA | | |
| MDYWGQGTSVTVSSGGGSGGGGSGGGGSDIVMSQSPSSLAVSVGEKVTMSCK | | |
| SSQSLLYSTNQKNYLAWYQQKPGQSPKLLIYWASTRESGVPDRFTGSGSGTDFTLT | | |
| ISSVKAEDLAVYYCQQYYSYPPWTFGGGTKLEIK | | |
| QVQLQQSGPELVKPGASVKMSCKASGYTFTDYVISWVKQRTGQGLEWNGEIYPG | 161 | 161 |
| SGSTYYNEKFKGKATLTADKSSNTAYMQLSSLTSEDSAVYFCARMDGPWFAYWG | | |
| QGTLVTVSAGGGSGGGGSGGGGSDIVLTQSPASLAVSLGQRATISCKASQSVDYD | | |
| GDSYMNWYQQKPGQPPKLLIYAASNLESGIPARFSGSGSGTDFTLNIHPVEEEDA | | |
| ATYYCQQSNEDPPTFGGGTKLEIK | | |
| QVTLKVSGPGILQPSQTLGLACTFSGISLSTSGMGLSWLRQPSGKALEWLASIWN | 162 | 162 |
| NDNYYNPSLKSRLTISKETSNNQVFLKLTSVDTADSTTYYCAWRPYYRYDSFAYWG | | |
| QGTLVTVSAGGGSGGGGSGGGGSDIQMTQSPASLAASVGETVTITCRASENIYYS | | |
| LAWYQQKQGKSPQLLIYNANSLEDGVPSRFSGSGSGTQYSMKINSMQPEDTATY | | |
| FCKQAYDVPYTFGGGTKLEIK | | |
| QVQLQQSGAELVRPGASVTLSCKASGYTFTDYEMHWVKQTPVHGLEWIGAIDPE | 163 | 163 |
| TGGTAYNQKFKVKAILTADKSSSTAYMELRSLTSEDSAVYYCTRLGDYDVMDYWG | | |
| QGTSVTVSSGGGSGGGGSGGGGSDIQMTQTTSSLSASLGDRVTISCRASQDISNY | | |
| LNWYQQKPDGTVKLLIYYTSRLHSGVPSRFSGSGSGTDYSLTISNLEQEDIATYFCQ | | |
| QDNTLPRTFGGGTKLEIK | | |
| QVQLQQPGAELVMPGASVKLSCKASGYTFTSYWMHWVKQRPGQGLEWIGEID | 164 | 164 |
| PSDSYTNYNQKFKGKSTLTVDKSSSTAYMQLSSLTSEDSAVYYCARAGRYGSSFDY | | |
| WGQGTTLTVSSGGGSGGGGSGGGGSDIQMTQTTSSLSASLGDRVTISCRASQDIS | | |
| NYLNWYQQKPDGTVKLLIYYTSRLHSGVPSRFSGSGSGTDYSLTISNLEQEDIATYF | | |
| CQQGNTLPWTFGGGTKLEIK | | |
| QVTLKESGPGILQPSQTLSLTCSFSGFSLSTSGMGVSWIRQPSGKGLEWLAHIYWD | 165 | 165 |
| DDKRYNPSLKSRLTISKDTSRNQGFLKITSVDTADTATYYCAGRPDDYDGAWFPY | | |
| WGQGTLVTVSAGGGSGGGGSGGGGSDIQMTQSPASLSVSVGETVTITCRASENI | | |
| YSNLAWYQQKQGKSPQLLVYAATNLADGVPSRFSGSGSGTQYSLKINSLQSEDFG | | |
| SYYCQHFWGTPWTFGGGTKLEIK | | |
| QVQLQQSGPELVKPGASVKMSCKASGYTFTDYVISWVKQRTGQGLEWIGEIYPG | 166 | 166 |
| SGSNYYNEKFKGKATLTADKSSNTAYMQLSSLTSEDSAVYFCAREEKIYFDYWGQG | | |
| TTLTVSSGGGSGGGGSGGGGSDIVLTQSPASLAVSLGQRATISCKASQSVDYDGDS | | |
| YMNWYRQKPGQPPKLLIYAASNLESGIPARFSGSGSGTDFTLNIHPVEEEDAATYY | | |
| CQQSNEDPWTFGGGTKLEIK | | |
| QVQLQQPGAELVKPGASVKLSCKASGYTFTSYWMHWVKQRPGQGLEWIGMIH | 167 | 167 |
| PNSGSTNYNEKFKSKATLTVDKSSSTAYMQLSSLTSEDSAVYYCARYDGYWFDYW | | |
| GQGTTLTVSSGGGSGGGGSGGGGSQAVVTQESALTTSPGETVTLTCRSSTGAVTT | | |
| SNYANWVQEKPDHLFTGLIGGTNNRAPGVPARFSGSLIGDKAALTITGAQTEDEAI | | |
| YFCALWYSNHWVFGGGTKLTVL | | |
| EVQLQQSGTVLARPGASVKMSCKTSGYTFTSYWMHWIKQRPGQGLEWIGAIYP | 168 | 168 |
| GNSDTTYNQKFKGKAKLTAVTSASTAYMELSSLTNEDSAVYYCTSLITTAYYFDYW | | |
| GQGTTLTVSSGGGSGGGGSGGGGSEIQMTQSPSSMSASLGDRITITCQATQDIVK | | |
| NLNWYQQKPGKPPSFLIYYATELAEGVPSRFSGSGSGSDYSLTISNLESEDFADYYC | | |
| LQFYEFPLTFGAGTKLELK | | |
| QVQLQQPGAELVKPGASVKLSCKASGYTFTSYWMHWVKQRPGQGLEWIGMIH | 169 | 169 |
| PNSGSTNYNEKFKSKATLTVDKSSSTAYMQLSSLTSEDSAVYYCAPETGDYGSSYV | | |
| WYFDVWGTGTTVTVSSGGGSGGGGSGGGGSQLVLTQSSSASFSLGASAKLTCTL | | |
| SSQHSTYTIEWYQQQPLKPPKYVMELKKDGSHSTGDGIPDRFSGSSSGADRYLSIS | | |
| NIQPEDEAIYICGVGDTIKEQFVFVFGGGTKVTVL | | |
| QVQLQQSGPELVKPGASVKMSCKASGYTFTDYVISWVKQRTGQGLEWIGEIYPG | 170 | 170 |
| SGSTYYNEKFKGKATLTADKSSNTAYMQLSSLTSEDSAVYFCARGKVTRFAYWGQ | | |
| GTLVTVSAGGGSGGGGSGGGGSDIVLTQSPASLAVSLGQRATISCKASQSVDYDG | | |
| DSYMNWYQQKPGQPPKLLIYAASNLESGIPARFSGSGSGTDFTLNIHPVEEEDAAT | | |
| YYCQQSNEDPPTFGGGTKLEIK | | |
| EVQLVESGGGLVKPGGSLKLSCAASGFTFSSYAMSWVRQTPEKRLEWVATISDGG | 171 | 171 |
| SYTYYPDNVKGRFTISRDNAKNNLYLQMSHLKSEDTAMYYCARDQDSNWEYFDY | | |
| WGQGTSLTVSSGGGSGGGGSGGGGSDIQMTQSPSSLSASLGERVSLTCRASQDI | | |
| GISLNWLQQEPDGTIKRLIYATSSLDSGVPKRFSGSRSGSDYSLTISSLESEDFVDYYC | | |
| LQYASSPYTFGGGTKLEIK | | |
| QIQLVQSGPELKKPGETVKISCKASGYTFTDYSMHWVRQAPGKGLKWMAWINTE | 172 | 172 |
| TGEPTYADDFKGRFAFSLETSASTAYLQINNLKNEDTATYFCARESWDRAMDYWG | | |
| QGTSVTVSSGGGSGGGGSGGGGSDIQMTQSPASLSASVGETVTITCRASENIYSYL | | |
| AWYQQKQGKSPQLLVYNAKNLADGVPSRFSGSGSGTQYSLKINSLQSEDFGYYCQ | | |
| HFWGTPYTFGGGTKLEIK | | |
| QVQLQQSGPQLVSPGASVKISCKASGYSFTNYWMHWVKQRPGQGLEWIGMID | 173 | 173 |
| PSDSETRLNQQFKDKATLTVDESSSTAYMQLSSPTSEDSAVYYCAIPYYAMDYWG | | |
| QGTSVTVSSGGGSGGGGSGGGGSDIKMTQSPSSMYASLGERVTITCKASQDINSY | | |
| LSWFQQKPGKSPKTLIYRANRLVDGVPSRFSGSGSGQDYSLTISSLEYEDMGIYYCL | | |
| QYDEFPLTFGAGTKLELK | | |
| QVQLQQPGSVLVRPGASVKLSCKASGYTFTSSWMHWAKQRPGQGLEWIGEIHP | 174 | 174 |
| NSGNTNYNEKNKGKATLTVDTSSSTAYVDLSSLTSEDSAVYYCATYYGNYVWYFD | | |
| VWGAGTSVTVSSGGGSGGGGSGGGGSDIQMTQSPSSLSASLGERVSLTCRASQD | | |
| IHGYLNLFQQKPGETIKHLIYETSNLDSGVPKRFSGSRSGSDYSLIIGSLESEDFADYY | | |
| CLQYASSPLTFGAGTKLELK | | |
| QVQLQQPGAELVKPGASVKLSCKASGYTFTSYWMHWVKQRPGQGLEWIGMIH | 175 | 175 |
| PNSGSTNYNEKFKSKATLTVDKSSSTAYMQLSSLTSEDSAVYYCASYGSSYWYFDV | | |
| WGTGTTVTVSSGGGSGGGGSGGGGSDIVMTQSHKFMSTSVGDRVSITCKASQD | | |
| VGTAVAWYQQKPGQSPKLLIYWASTRHTGVPDRFTGSGSGTDFTLTISNVQSEDL | | |
| ADYFCQQYSSYPFTFGSGTKLEIK | | |
| QVQLQQPGAELVKPGASVKMSCKASGYTFTSYNMHWVKQTPGQGLEWIGALYS | 176 | 176 |
| GNGDTSYNQKFKGKATLTADKSSSTAYMQLSSLTSEDSAVYYCARDYYGSSHLWY | | |
| FDVWGAGTTVTVSSGGGSGGGGSGGGGSQAVVTQESALTTSPGETVTLTCRSST | | |
| GAVTTSNYANWVQEKPDHLFTGLIGGTNNRAPGVPARFSGSLIGDKAALTITGAQ | | |
| TEDEAIYFCALWYSNHLVFGGGTKLTVL | | |
| QVTLKESGPGILQPSQTLSLTCSFSGFSLSTSGMGVSWIRQPSGKGLEWLAHIYWD | 177 | 177 |
| DDKRYNPSLKSRLTISKDTSRNQVFLKITSVDTADTATYYCARRAHYDYGWYFDVW | | |
| GAGTTVTVSSGGGSGGGGSGGGGSDIVLTQSPASLAVSLGQRATISCKASQSVDY | | |
| DGDSYMNWYQQKPGQPPKLLIYVASNLESGIPARFRGSGSGTDFTLNIHPVEEED | | |
| AAIYYCQQSHEDPRTFGGGTKLEIK | | |
| QVQLQQPGAELVKPGASVKLSCKASGYTFTSYWMHWVKQRPGQGLEWIGMIH | 178 | 178 |
| PNSGSTNYNEKFKSKATLTVDKSSSTAYMQLSSLTSEDSAVYYCAGYDYDWYFDV | | |
| WGTGTTVTVSSGGGSGGGGSGGGGSENVLTQSPAIMSASPGEKVTMTCSASSSV | | |
| SYMHWYQQKSSTSPKLWIYDTSKLASGVPGRFSGSGSGNSYSLTISSMEAEDVAT | | |
| YYCFQGSGYPLTFGAGTKLELK | | |
| QVKLVESGGDLVKPGGSLKLSCAASGFTFSSYGMSWVRQTPDKRLEWVATISSGG | 179 | 179 |
| SYTYYPDSVKGRFTISRDNAKNTLYLQMSSLKSEDTAMYYCARHEDSNYHYFDYW | | |
| GQGTTLTVFSGGGSGGGGSGGGGSDIQMTQSPASLSVSVGETVTITCRASENIYS | | |
| NLAWYQQKQGKSPQLLVYAATNLADGVPSRFSGSGSGTQYSLKINSLQSEDFGSY | | |
| YCQHFWGTPYTFGGGTKLEIK | | |
| QVKLVESGGDLVKPGGSLKLSCAASGFTFSSYGMSWVRQTPDKRLEWVATISSGG | 180 | 180 |
| SYTYYPDSVKGRFTISRDNAKNTLYLQMSSLKSEDTAMYYCARQNDSSWAWFAY | | |
| WGQGTLVTVSAGGGSGGGGSGGGGSETTVTQSPASLSVATGEKVTIRCITSTDID | | |
| DDMNWYQQKPGEPPKLLISEGNTLRPGVPSRFSSSGYGTDFVFTIENTLSEDVADY | | |
| YCLQSDNMPLTFGAGTKLELK | | |
| QVQLQQPGAELVKPGASVKLSCKASGYTFTSYWMHWVKQRPGQGLEWIGMIH | 181 | 181 |
| PNSGSTNYNEKFKSKATLTVDKSSSTAYMQLSSLTSEDSAVYYCALPYSNYGWYFD | | |
| VWGTGTTVTVSSGGGSGGGGSGGGGSDIQMTQTTSSLSASLGDRVTISCRASQD | | |
| ISNYLNWYQQKPDGTVKLLIYYTSRLHSGVPSRFSGSGSGTDYSLTISNLEQEDIATY | | |
| FCQQGNTLPFTFGSGTKLEIK | | |
| QVQLQQPGAELVRPGSSVKLSCKASGYTFTSYWMHWVKQRPIQGLEWIGNIDPS | 182 | 182 |
| DSETHYNQKFKDKATLTVDKSSSTAYMQLSSLTSEDSAVYYCARDYYGSYWYFDV | | |
| WGTGTTVTVSSGGGSGGGGSGGGGSDIQMTQTTSSLSASLGDRVTISCSASQGIS | | |
| NYLNWYQQKPDGTVKLLIYYTSSLHSGVPSRFSGSGSGTDYSLTISNLEPEDIATYYC | | |
| QQYSKLPYTFGGGTKLEIK | | |
| EVQLQQSGAELVKPGASVKLSCTASGFNIKDYYMHWVKQRTEQGLEWIGRIDPE | 183 | 183 |
| DGETKYAPKFQGKATITADTSSNTAYLQLSSLTSEDTAVYYCAAYGNSAWFAYWG | | |
| QGTLVTVSAGGGSGGGGSGGGGSDIVMTQSPATLSVTPGDRVSLSCRASQSISDY | | |
| LHWYQQKSHESPRLLIKYASQSISGIPSRFSGSGSGSDFTLSINSVEPEDVGVYYCQ | | |
| NGHSFPWTFGGGTKLEIK | | |
| QVQLKESGPGLVAPSQSLSITCTVSGFSLTSYGVHWVRQPPGKGLEWLGVIWAG | 184 | 184 |
| GSTNYNSALMSRLSISKDNSKSQVFLKMNSLQTDDTAMYYCAREGGYTGYFDVW | | |
| GAGTTVTVSSGGGSGGGGSGGGGSQAVVTQESALTTSPGGTVILTCRSSTGAVTT | | |
| SNYANWVQEKPDHLFTGLIGGTSYRAPGVPVRFSGSLIGDKAALTITGAQTEDDA | | |
| MYFCALWYSTHYVFGGGTKVTVL | | |
| QVQLQQPGAELVRPGSSVKLSCKASGYTFTSYWMHWVKQRPIQGLEWIGNIDPS | 185 | 185 |
| DSETHYNQKFKDKATLTVDKSSSTAYMQLSSLTSEDSAVYYCAYSNYVPYYAMDY | | |
| WGQGTSVTVSSGGGSGGGGSGGGGSDIQMTQSPSSLSASLGERVSLTCRASQEIS | | |
| GYLSWLQQKPDGTIKRLIYAASTLDSGVPKRFSGSRSGSDYSLTISSLESEDFADYYC | | |
| LQYASYPWTFGGGTKLEIK | | |
| QVQLQQSGPELVKPGASVKMSCKASGYTFTDYVISWVKQRTGQGLEWIGEIYPG | 186 | 186 |
| SGSAYYNEKFKGKATLTADKSSNTAYMQLSSLTSEDSAVYFCARRGFDYWGQGTT | | |
| LTVSSGGGSGGGGSGGGGSDIVLTQSPASLAVSLGQRATISCKASQSVDYDGDSY | | |
| MNWYQQKPGQPPKLLIYAASNLESGIPARFSGSGSGTDFTLNIHPVEEEDAATYYC | | |
| QQSNEDPLPTFGAGTQRELK | | |
| QVQLQQPGAELVKPGASVKLSCKASGYTFTSYWMHWVKQRPGQGLEWIGMIH | 187 | 187 |
| PNSGSTNYNEKFKSKATLTVDKSSSTAYMQLSSLTSEDSAVYYCARDYYGSGYGYYF | | |
| DYWGQGTTLTVSSGGGSGGGGSGGGGSQIVLTQSPAIMSASPGEKVTMTCSASS | | |
| SVSYMHWYQQKSGTSPKRWIYDTSKLASGVPVRFSGSGSGTSYSLTISSMEAEDA | | |
| ATYYCQQWSSNPLTFGAGTKLELK | | |
| QVQLQQPGAELVKPGASVKLSCKASGYTFTSYWMHWVKQRPGQGLEWIGMIH | 188 | 188 |
| PNSGSTNYNEKFKSKATLTVDKSSSTAYMQLSSLTSEDSAVYYCARDYYGSSYGWY | | |
| FDVWGTGTTVTVSSGGGSGGGGSGGGGSDIQMTQSPASLSASVGETVTITCRAS | | |
| GNIHNYLAWYQQKQGKSPQLLVYNAKTLADGVPSRFSGSGSGTQYSLKINSLQPE | | |
| DFGSYYCQHFWSTPWTFGGGTKLEIK | | |
| QVQLQQPGAELVKPGASVKLSCKASGYTFTSYWMHWVKQRPGQGLEWIGMIH | 189 | 189 |
| PNSGSTNYNEKFKSKATLTVDKSSSTAYMQLSSLTSEDSAVYYCARDYYGSSYGWY | | |
| FDVWGTGTTVTVSSGGGSGGGGSGGGGSDIQMTQSPASLSASVGETVTITCRAS | | |
| ENIYSYLAWYQQKQGKSPQLLVYNAKTLAEGVPSRFSGSGSGTQFSLKINSLQPED | | |
| FGSYYCQHHYGTPFTFGSGTKLEIK | | |
| QVQLQQPGAELVKPGASVKLSCKASGYTFTSYWMHWVKQRPGQGLEWIGMIH | 190 | 190 |
| PNSGSTNYNEKFKSKATLTVDKSSSTAYMQLSSLTSEDSAVYYCASDYYGSSYGWY | | |
| FDVWGTGTTVTVSSGGGSGGGGSGGGGSENVLTQSPAIMSASLGEKVTMSCRA | | |
| SSSVNYMYWSQQKSDASPKLWIYYTSNLAPGVPPRFSGSGSGNSYSLTISSMEGE | | |
| DAATYYCQQFTSSLTFGAGTKLELK | | |
| QVQLQQPGAELVKPGASVKLSCKASGYTFTSYWMHWVKQRPGQGLEWIGMIH | 191 | 191 |
| PNSGSTNYNEKFKSKATLTVDKSSSTAYMQLSSLTSEDSAVYYCARDYYGSSYGWY | | |
| FDVWGTGTTVTVSSGGGSGGGGSGGGGSQAVVTQESALTTSPGETVTLTCRSST | | |
| GAVTTSNYANWVQEKPDHLFTGLIGSTNNRAPGVPARFSGSLIGDKSALTITGAQT | | |
| EDEAIYFCTLWYSNHWVFGGGTKLTVL | | |
| QVQLQQPGAELVKPGASVKLSCKASGYTFTSYWMHWVKQRPGQGLEWIGMIH | 192 | 192 |
| PNSGSTNYNEKFKSKATLTVDKSSSTAYMQLSSLTSEDSAVYYCTRDYYGSGYGWY | | |
| FDVWGTGTTVTVSSGGGSGGGGSGGGGSDIVMTQSHKFMSTSVGDRVSITCKA | | |
| SQDVGTAVAWYQQKPGQSPKLLIYWASTRHTGVPDRFTGSGSGTDFTLTISNVQS | | |
| EDLADYFCQQYSSYPFTFGSGTKLEIK | | |
| QVQLQQPGAELVRPGASVKLSCKASGYTFTNYWMNWVKQRPGQGLEWIGMID | 193 | 193 |
| PSDSETHYNQMFKDKATLTVDKSSSTAYMQLSSLTSEDSAVYYCATYDGYYRFAY | | |
| WGQGTLVTVSAGGGSGGGGSGGGGSDIKMTQSPSSMYASLGERVTITCKASQDI | | |
| NSYLSWFQQKPGKSPKTLIYRANRLVDGVPSRFSGSGSGQDYSLTISSLEYEDMGIY | | |
| YCLQYDEFPPTFGAGTKLELK | | |
| QVQLQQPGAELVRPGASVKLSCKASGYTFTNYWMNWVKQRPGQGLEWIGMID | 194 | 194 |
| PSDSETHFNQMFKDKATLTVDKSSSTAYMQLSSLTSEDSAVYYCATYDVYYRFAY | | |
| WGQGTLVTVSAGGGSGGGGSGGGGSDIQMTQSPASLSVSVGETVTITCRASENI | | |
| YSNLAWYQQKQGKSPQLLVYAATNLADGVPSRFSGSGSGTQYSLKINSLQSEDFG | | |
| SYYCQHFWGTPFTFGSGTKLEIK | | |
| QVQLQQPGAELVKPGASVKLSCKASGYTFTSYWMHWVKQRPGQGLEWIGMIH | 195 | 195 |
| PNSGSTNYNEKFKSKATLTVDKSSSTAYMQLSSLTSEDSAVYYCARDYGNYDYAM | | |
| DYWGQGTSVTVSSGGGSGGGGSGGGGSDIVMTQSPATLSVTPGDRVSLSCRAS | | |
| QSISDYLHWYQQKSHESPRLLIKYASQSISGIPSRFSGSGSGSDFTLSINSVEPEDVG | | |
| VYYCQNGHSFPYTFGGGTKLEIK | | |
| QVQLQQPGAELVKPGASVKLSCKASGYTFTSYWMHWVKQRPGQGLEWIGMIH | 196 | 196 |
| PNSGSTNYNEKFKSKATLTVDKSSSTAYMQLSSLTSEDSAVYYCARDYGNYDYAM | | |
| DYWGQGTSVTVSSGGGSGGGGSGGGGSQAVVTQESALTTSPGETVTLTCRSSTG | | |
| AVTTSNYANWVQEKPDHLFTGLIGGTNNRAPGVPARFSGSLIGDKAALTITGAQT | | |
| EDEAIYFCALWYSNHWVFGGGTKLTVL | | |
| EVKLVESGGDLVKPGGSLKLSCAASGFTFSSYGMSWVRQTPDKRLEWVATISSGG | 197 | 197 |
| SYTYYPDSVKGRFTISRDNAKNTLYLQMSSLKSEDTAMYYCASQLTGTWYYFDYW | | |
| GQGTTLTVSSGGGSGGGGSGGGGSEIFVTQSPASLSMAIGEKVTIRCITSTDIDDD | | |
| MNWYQQKPGEPPKLLISEGNTLRPGVPSRFSSSGYGTDFVFTIENMLSEDVADYY | | |
| CLQSDNLPLTFGAGTKLELK | | |
| QVKLVESGGDLVKPGGSLKLSCAASGFTFSSYGMSWVRQTPDKRLEWVATISSGG | 198 | 198 |
| SYTYYPDSVKGRFTISRDNAKNTLYLQMSSLKSEDTAMYYCASQLTGTWYYFDYW | | |
| GQGTTLTVSSGGGSGGGGSGGGGSQIVLTQSPAIMSASPGEKVTITCSASSSVSY | | |
| MHWFQQKPGTSPKLWIYSTSNLASGVPARFSGSGSGTSYSLTISRMEAEDAATYY | | |
| CQQRSSYPPTFGSGTKLELK | | |
| QVKLVESGGDLVKPGGSLKLSCAASGFTFSSYGMSWVRQTPDKRLEWVATISSGG | 199 | 199 |
| SYTYYPDSVKGRFTISRDNAKNTLYLQMSSLKSEDTAMYYCASQLTGTWYYFDYW | | |
| GQGTTLTVSSGGGSGGGGSGGGGSQIVLTQSPAIMSASPGEKVTMTCSASSSVSY | | |
| MHWYQQKSGTSPKRWIYDTSKLASGVPARFSGSGSGTSYSLTISSMEAEDAATYY | | |
| CQQWSSNPLTFGSGTKLEIK | | |
| DVKLVESGGGLVKLGGSLKLSCAASGFTFSNYYMSWVRQTPEKRLELVAVINSNG | 200 | 200 |
| GSTYYPDTVKGRFTISRDNAKNTLYLQMSSLKSEDTALYYCARQEGIGYAMDYWG | | |
| QGTSVTVSSGGGGSGGGGSGGGGSQIVLTQSPAIMSASPGEKVTLTCSASSSVSSS | | |
| YLYWYQQKPGSSPKLWIYSTSNLASGVPARFSGSGSGTSYSLTISSMEAEDAASYFC | | |
| HQWSSYPPTFGAGTKLELKR | | |
| EVQLQQSGPELVKPGASVKISCKTSGYTFTEYTMHWVKQSHGKSLEWIGGIYPNN | 201 | 201 |
| GGTSYNQKFKGKATLTVDKSSSTAYMELRSLTSEDSAVYYCARGGWLLGYWGQG | | |
| TTLTVSSGGGGSGGGGSGGGGSQLVLTQSSSASFSLGASAKLTCTLSSQHSTYTIE | | |
| WYQQQPLKPPKYVMELKKDGSHSTGDGIPDRFSGSSSGADRYLSISNIQPEDEAIYI | | |
| CGVGDTIKEQFVYVFGGGTKVTVLR | | |
| QVQLKQSGPGLVQPSQSLSITCTVSGFSLTSYGVHWVRQSPGKGLEWLGVIWSG | 202 | 202 |
| GSTDYNAAFISRLSISKDNSKSQVFFKMNSLQADDTAIYYCARDGGIRGAMDYWG | | |
| QGTSVTVSSGGGGSGGGGSGGGGSDVLMTQTPLSLPVSLGDQASISCRSSQSIVH | | |
| SNGNTYLEWYLQKPGQSPKLLIYKVSNRFSGVPDRFSGSGSGTDFTLKISRVEAEDL | | |
| GVYYCFQGSHVPWTFGGGTKLEIKR | | |
| QVQLQQSGAELMKPGASVKISCKATGYTFSSYWIEWVKQRPGHGLEWIGEILPGS | 203 | 203 |
| GSTNYNEKFKGKATFTADTSSNTAYMQLSSLTSEDSAVYYCARRGYGYDEGFDYW | | |
| GQGTTLTVSSGGGGSGGGGSGGGGSDIKMTQSPSSMYASLGERVTITCKASQDI | | |
| NSYLSWFQQKPGKSPKTLIYRANRLVDGVPSRFSGSGSGQDYSLTISSLEYEDMGIY | | |
| YCLQYDEFPPTFGAGTKLELKR | | |
| QVQLQQSGAELVRPGASVTLSCKASGYTFTDYEMHWVKQTPVHGLEWIGAIDPE | 204 | 204 |
| TGGTAYNQKFKGKATLTADKSSSTAYMELRSLTSEDSAVYYCTRNYDYAMDYWG | | |
| QGTSVTVSSGGGGSGGGGSGGGGSDVVMTQTPLTLSVTIGQPASISCKSSQSLLD | | |
| SDGKTYLNWLLQRPGQSPKRLIYLVSKLDSGVPDRFTGSGSGTDFTLKISRVEAEDL | | |
| GVYYCWQGTHFPWTFGGGTKLEIKR | | |
| DVKLVESGGGLVKLGGSLKLSCAASGFTFSSYYMSWVRQTPEKRLELVAVINSNGG | 205 | 205 |
| STFYPDTVKGRFTISRDNAKNTLYLQMSSLKSEDTALYYCARQEGIGYALDYWGQG | | |
| TSVTVSSGGGGSGGGGSGGGGSQIVLTQSPAIMSASPGEKVTLPCSASSSVSSSYL | | |
| YWYQQKPGSSPKLWIYSTSNLASGVPARFSGSGSGTSYSLTISSMEAEDAASYFCH | | |
| QWSSYPPTFGAGTKLELKR | | |
| EVKLVESGGDLVKPGGSLKLSCAASGFTFSSYAMSWVRQTPEKRLEWVAAISSGG | 206 | 206 |
| STYYPDSVKGRFTISRDNARNILYLQMSSLRSEDTAMYYCAREREWGVYYGSSLDY | | |
| WGQGTTLTVSSGGGGSGGGGSGGGGSDVLMTQTPLSLPVSLGDQASISCRSSQS | | |
| IVYSNGNTYLEWYLQKPGQSPKLLIYKVSNRFSGVPDRFSGSGSGTDFTLKISRVEA | | |
| EDLGVYYCFQGSHVPPTFGGGTKLEIKR | | |
| EVQLQQSGAELVKPGASVKLSCTASGFNIKDTYMHWVKQRPEQGLEWIGRIDPA | 207 | 207 |
| NGNTKYDPKFQGKATITADTSSNTAYLQLSSLTSEDTAVYYCARSDGNYDWGQGT | | |
| LVTVSAGGGGSGGGGSGGGGSDIQMTQSPASLSVSVGETVTITCRASENIYNNLA | | |
| WYQQKQGKSPQLLVYAATNLADGVPSRFSGSGSGTQYSLKINSLQSEDFGSYYCQ | | |
| HFWGTPWTFGGGTKLEIKR | | |
| DVKLVESGGGLVKLGGSLKLSCAASGFTFSNYYMSWVRQTPEKRLELVAVINSNG | | 208 |
| GSTYYPDTVKGRFTISRDNAKNILYLQMSSLKSEDTALYYCARQEGIGYGMDYWG | | |
| QGTSVTVSSGGGGSGGGGSGGGGSQIVLTQSPAIMSASPGEKVTLTCSASSSVSSS | | |
| YLYWYQQKPGSSPKLWIYSTSNLASGVPARFSGSGSGTSYSLTISSMEAEDAASYFC | | |
| HQWSSYPPTFGAGTKLELKR | | |
| EVQLVESGGGLVQPKGSLKLSCAASGFTFNTYVMNWVRQAPGKGLEWVARIRSK | 209 | 209 |
| SDNYATYYADSVKDIFTISRDDSQSMLYLQMNNLKTEDTAMYYCVRHDGVVGFD | | |
| VWGAGTTVTVSSGGGGSGGGGSGGGGSQIVLTQSPAIMSASPGEKVTMTCSAS | | |
| SSVSYMYWYQQKPGSSPRLLIYDTSNLASGVPVRFSGSGSGTSYSLTISRMEAEDA | | |
| ATYYCQQWSTYPPITFGAGTKLELKR | | |
| DVQLQESGPGLVKPSQSLSLTCSVTGYSITSGYYWNWIRQFPGNKLEWMGYISYD | 210 | 210 |
| GSNNYNPSLKNRISITRDTSKNQFFLKLNSVTTEDTATYYCARGGGRGWGQGTLV | | |
| TVSAGGGGSGGGGSGGGGSQIVLTQSPAIMSASPGEKVTMTCSASSSVSYMYWY | | |
| QQKPGSSPRLLIYDTSNLASGVPVRFSGSGSGTSYSLTISRMEAEDAATYYCQQWS | | |
| SYPFTFGSGTKLEIKR | | |
| QIQLVQSGPELKKPGETVKISCKASGYTFTDYSMHWVKQAPGKGLKWMGWINT | 211 | 211 |
| ETGEPTYADDFKGRFAFSLETSASTAYLQINNLKNEDTATYFCARDYYDYYYAMDY | | |
| WGQGTSVTVSSGGGGSGGGGSGGGGSQIVLSQSPAILSASPGEKVTMTCRASSS | | |
| VSYMHWYQQKPGSSPKPWIYATSNLASGVPARFSGSGSGTSYSLTISRVEAEDAA | | |
| TYYCQQWSSNPYTFGGGTKLEIKR | | |
| QIQLVQSGPELKKPGETVKISCKASGYTFTDYSMHWVKQAPGKGLKWMGWINT | 212 | 212 |
| ETGEPTYADDFKGRFAFSLETSASTAYLQINNLKNEDTATYFCARESWDRAMDYW | | |
| GQGTSVTVSSGGGGSGGGGSGGGGSDIQMTQSPASLSVSVGETVTITCRASENIY | | |
| SNLAWYQQKQGKSPQLLVYAATNLADGVPSRFSGSGSGTQYSLKINSLQSEDFGS | | |
| YYCQHFWGTPWTFGGGTKLEIKR | | |
| QVQLQQPGAELVRPGASVKLSCKASGYTFTNYWMNWVKQRPEQGLEWIGRIDP | 213 | 213 |
| YDSETHYNQKFKDKAILTVDKSSSTAYMQLSSLTSEDSAVYYCARIYSDYDGAWFA | | |
| YWGQGTLVTVSAGGGGSGGGGSGGGGSDIVMTQSHKFMSTSVGDRVSITCKAS | | |
| QDVSTAVAWYQQKPGQSPKLLIYWASTRHTGVPDRFTGSGSGTDYTLTISSVQAE | | |
| DLALYYCQQHYSTPWTFGGGTKLEIKR | | |
| EVQLQQSGPELVKPGASVKMSCKASGYTFTDYYMDWVKQSHGESFEWIGRVNP | 214 | 214 |
| YNGGTSYNQKFKGKATLTVDKSSSTAYMELNSLTSEDSAVYYCARGTVGFAYWGQ | | |
| GTLVTVSAGGGGSGGGGSGGGGSDVVMTQTPLTLSVTIGQPASISCKSSQSLLDS | | |
| DGKTYLNWLLQRPGQSPKRLIYLVSKLDSGVPDRFTGSGSGTDFTLKISRVEAEDLG | | |
| VYYCWQGTHFPWTFGGGTKLEIKR | | |
| EVKLVESGGGLVKPGGSLKLSCAASGFTFSSYAMSWVRQTPEKRLEWVASISSGGS | 215 | 215 |
| TYYPDSVKGRFTISRDNARNILSLQMSSLRSEDTAMYYCAREREWGVFYGSSLDY | | |
| WGQGTTLTVSSGGGGSGGGGSGGGGSDVLMTQTPLSLPVSLGDQASISCRSSQS | | |
| IVHSNGNTYLEWYLQKPGQSPKFLIYKVSNRFSGVPDRFSGSGSGTDFTLKISRVEA | | |
| EDLGVYYCFQGSHVPPTFGGGTKLEIKR | | |
| EVMLVESGGGLVKPGGSLKLSCAASGFTFSSYAMSWIRQTPEKRLEWVATISSGG | 216 | 216 |
| SYTYYPDSVKGRFTISRDNAKNTLYLQMSSLRSEDTAMYYCARHDDSSYGYFDYW | | |
| GQGTTLTVSSGGGGSGGGGSGGGGSETTVTQSPASLSVATGEKVTIRCITSTDIDD | | |
| DMNWYQQKPGEPPKLLISEGNTLRPGVPSRFSSSGYGTDFVFTIENTLSEDVADYY | | |
| CLQSDNMPLTFGGGTKLEIKR | | |
| EVKLVESGGGLVKPGGSLKLSCAASGFTFSNYAMSWVRQTPEKRLEWVASISSGG | 217 | 217 |
| TTYYPDSVKGRFTISRDNARNILYLQMSSLRSEDTAMYYCARTMPDVWGAGTTVT | | |
| VSSGGGGSGGGGSGGGGSDIQMTQSPSSLSASLGGKVTITCKASQDINKYIAWYQ | | |
| HKPGKGPRLLIHYTSTLQPGIPSRFSGSGSGRDYSFSISNLEPEDIATYYCLQYDNLY | | |
| MYTFGGGTKLEIKR | | |
| QVQLKESGPGLVAPSQSLSITCTVSGFSLTSYGVHWVRQPPGKGLEWLGVIWAG | 218 | 218 |
| GSTNYNSALMSRLSISKDNSKSQVFLKMNSLQTDDTAMYYCARDTDGYYWAMD | | |
| YWGQGTSVTVSSGGGGSGGGGSGGGGSDIQMNQSPSSLSASLGDTITITCHASQ | | |
| NINVWLSWYQQKPGNIPKLLIYKASNLHTGVPSRFSGSGSGTGFTLTISSLQPEDIA | | |
| TYYCQQGQSYPYTFGGGTKLEIKR | | |
| DVQLQESGPGLVKPSQSLSLTCTVTGYSITSDHAWNWIRQFPGNKLEWMGYISYS | 219 | 219 |
| GSTTYNPSLKSRISITRDTSKNQFFLQLNSVTTEDTATYYCARKWGDYWGQGTSVT | | |
| VSSGGGGSGGGGSGGGGSQIVLTQSPALMSASPGEKVTMTCSASSSVSYMYWY | | |
| QQKPRSSPKPWIYLTSNLASGVPARFSGSGSGTSYSLTISSMEAEDAATYYCQQWS | | |
| SNPPTFGGGTKLEIKR | | |
| QVQLQQSGAELVRPGASVTLSCKASGYTFTDYEMHWVKQTPVHGLEWIGAIDPE | 220 | 220 |
| TGGTAYNQKFKGKATLTADKSSSTAYMELRSLTSEDSAVYYCTRNYDYALDYWGQ | | |
| GTSVTVSSGGGGSGGGGSGGGGSDVVMTQTPLTLSVTIGQPASISCKSSQSLLDS | | |
| DGKTYLNWLLQRPGQSPKRLIYLVSKLDSGVPDRFTGSGSGTDFTLKISRVEAEDLG | | |
| FYYCWQGTHFPWTFGGGTKLEIKR | | |
| DVQLQESGPGLVKPSQSLSLTCSVTGYSITSGYYWNWIRQFPGNKLEWMGYISYD | 221 | 221 |
| GSNDYNPSLKNRISITRDTSKNQFFLKLNSVTTEDTATYYCARGGGRGWGQGTLV | | |
| TVSAGGGGSGGGGSGGGGSQIVLTQSPAIMSASPGEKVTMTCSASLSVSDMYW | | |
| YQQKPGSSPRLLIYDTSNLASGVPVRFSGSGSGTSYSLTISRMEAEDAATYYCQQW | | |
| SSYPFTFGSGTKLEIKR | | |
| DVKLVESGGGLVKLGGSLKLSCAASGFTFSNYYMSWVRQTPEKRLELVAVINSNG | 222 | 222 |
| GSTYYPDTVKGRFTISRDNAKNTLYLQMSSLKSEDTALYYCARQEEIGYAMDYWG | | |
| QGTSVTVSSGGGGSGGGGSGGGGSQIVLTQSPAIMSASPGEKVTLTCSASSSVSSS | | |
| YLYWYQQRPGSSPKLWIYSTSNLASGVPARFSGSGSGTSYSLTISSMEAEDAASYFC | | |
| HQWSSYPPTFGAGTKLELKR | | |
| EVQLQQSGAELVRPGALVKLSCKASGFNIKDYFMHWVKQRPEQGLEWIGWIDPE | 223 | 223 |
| TDNTIYDPKFQGKASITADTSSNTAYLQLSSLTSEDTAVYYCARSGNMGFTYWGQ | | |
| GTLVTVSAGGGGSGGGGSGGGGSENVLTQSPAIMSASLGEKVTMSCRASSSVNY | | |
| MYWYQQKSDASPKLWIYYTSNLAPGVPARFSGSGSGNSYSLTISSMEGEDAATYY | | |
| CQQFTSSPSTFGGGTKLEIKR | | |
| EVMLVESGGGLVKPGGSLKLSCAASGFTFSSYAMSWVRQTPEKRLEWVATISSGG | 224 | 224 |
| SYTYYPDSVKGRFTISRDNAKNTLYLQMSSLRSEDTAMYYCASQGGSSWGAMDY | | |
| WGQGTSVTVSSGGGGSGGGGSGGGGSETTVTQSPASLSMAIGEKVTIRCITNTDI | | |
| DDDMNWYQQKPGEPPKLLISEGNTLRPGVPSRFSSSGYGTDFVFTIENMLSEDVA | | |
| DYYCLQSDNLPLTFGAGTKLELKR | | |
| EVMLVESGGGLVKPGGSLKLSCAASGFTFSSYAMSWVRQTPEKRLEWVATISNG | 225 | 225 |
| GSYTYYPDSVKGRFTISRDNAKNTLYLQMSSLRSEDTAMYYCARHEITTRFAYWG | | |
| QGTLVTVSAGGGGSGGGGSGGGGSDIVLTQSPASLAVSLGQRATISCKASQSVDY | | |
| DGDSYMNWYQQKPGQPPKLLIYAASNLESGIPARFSGSGSGTDFTLNIHPVEEED | | |
| AATYYCQQSNEDPWTFGGGTKLEIKR | | |
| VQLQESGPGLVKPSQSLSLTCSVTGYSITSGYYWNWIRQFPGNKLEWMGYMSYD | 226 | 226 |
| GSNNYNPSLKNRISITRDTSKNQFFLKLNSVTTEDTATYYCAREAGYFDYWGQGTT | | |
| LTVSSGGGGSGGGGSGGGGSDIVLTQSPATLSVTPGDSVSLSCRASQSISNNLHW | | |
| YQQKSHESPRLLIKYASQSISGIPSRFSGSGSGTDFTLSINSVETEDFGMYFCQQSNS | | |
| WPFTFGSGTKLEIKR | | |
| EVQLVESGGGLVQPKGSLKLSCAASGFSFNTYAMNWVRQAPGKGLEWVARIRSK | 227 | 227 |
| SNNYATYYADSVKDRFTISRDDSESMLYLQMNNLKTEDTAMYYCVRQYGYDFDY | | |
| WGQGTTLTVSSGGGGSGGGGSGGGGSQIVLTQSPAIMSASPGEKVTLTCSASSSV | | |
| SSSYLYWYQQKPGSSPKLWIYSTSNLASGVPARFSGSGSGTSYSLTISSMEAEDAAS | | |
| YFCHQWSSYPPTFGGGTKLEIKR | | |
| EVQLVESGGDLVKPGGSLKLSCAASGFTFSSYGMSWVRQTPDKRLEWVATISSGG | 228 | 228 |
| SYTYYPDSVKGRFTISRDNAKNTLYLQMSSLKSEDTAMYYCARHKGVNWDYFDY | | |
| WGQGTTLTVSSGGGGSGGGGSGGGGSETTVTQSPASLSVATGEKVTIRCITSTDI | | |
| DDDMNWYQQKPGEPPKLLISEGNTLRPGVPSRFSSSGYGTDFVFTIENTLSEDVA | | |
| DYYCLQSDNMPLTFGAGTKLELKR | | |
| QVQLQQSGAELVRPGASVTLSCKASGYTFTDYEMHWVKQTPVHGLEWIGAIDPE | 229 | 229 |
| TGGTAYNQKFKGKATLTADKSSSTAYMELRSLTSEDSAVYYCTRGDGNYDSWYFD | | |
| VWGAGTTVTVSSGGGGSGGGGSGGGGSDVVMTQTPLTLSVTIGQPASISCKSSQ | | |
| SLLDSDGKTYLHWLLQRPGQSPKRLIYLVSKLDSGVPDRFTGSGSGTDFTLKISRVE | | |
| AEDLAVYYCWQGTHFPWTFGGGTKLEIKR | | |
| EVMLVESGGGLVKPGGSLKLSCAASGFTFSSYAMSWVRQTPEKRLEWVATISSGG | 230 | 230 |
| SYTYYPDSVKGRFTISRDNAKNTLYLQMSSLRSEDTAMYYCARLPVTTVVFDYWG | | |
| QGTTLTVSSGGGGSGGGGSGGGGSDIQMTQSPSSLSASLGGKVTITCKASQDINK | | |
| YIAWYQHKPGKGPRLLIHYTSTLQPGIPSRFSGSGSGRDYSFSISNLEPEDIATYYCL | | |
| QYDNLRTFGGGTKLEIKR | | |
| EVQLVESGGGLVKPGGSLKLSCAASGFTFSSYAMSWVRQTPEKRLEWVATISSGG | 231 | 231 |
| SYTYYPDSVKGRFTISRDNAKNTLYLQMSSLRSEDTAMYYCARRPVVVPFDYWGQ | | |
| GTTLTVSSGGGGSGGGGSGGGGSQAVVTQESALTTSPGETVTLTCRSSTGAVTTS | | |
| NYANWVQEKPDHLFTGLIVGTNNRAPGVPARFSGSLIGDKAALTITGAQTEDEAIY | | |
| FCVLWYSNHLVFGGGTKLTVLG | | |
| QVQLKQSGPGLVQPSQSLSITCTVSGFSLTSYGVHWVRQSPGKGLEWLGVIWSG | 232 | 232 |
| GSTDYNAAFISRLSISKDNSKSQVFFKMNSLQADDTAIYYCARGWDADYFDYWG | | |
| QGTTLTVSSGGGGSGGGGSGGGGSNIVMTQSPKSMSMSVGERVTLSCKASENV | | |
| GTYVSWYQQKPEQSPKLLIYGASNRYTGVPDRFTGSGSATDFTLTISSVQAEDLAD | | |
| YHCGQSYSYPPTFGAGTKLELKR | | |
| QVQLQQPGAELVKPGASVKLSCKASGYTFTNYWMHWVKQRPGQGLEWIGMIH | 233 | 233 |
| PNSGSTNYNEKFKSKATLTVDKSSSTAYMQLSSLTSEDSAVYYCTRYDYDDYWGQ | | |
| GTTLTVSSGGGGSGGGGSGGGGSDIVLTQSPASLAVSLGQRATISCRASETVDSYG | | |
| YSFMHWYQQKPGQPPKLLIYRASNLESGIPARFSGSGSRTDFTLTINPVEADDVAT | | |
| YYCQQSNEDPRTFGGGTKLEIKR | | |
| EVQLQQSGPELVKPGASVKISCKASGYTFTDYYMNWVKQSHGKSLEWIGDINPN | 234 | 234 |
| NGGTSYNQKFKGKATLTVDKSSSTAYMDLRSLTSEDSAVYYCARSELGLYAMDYW | | |
| GQGTSVTVSSGGGGSGGGGSGGGGSDIVMSQSPSSLAVSVGEKVTMSCKSSQSL | | |
| LYSTNQKNYLAWYQQKPGQSPKLLLYWASTRESGVPDRFTGSGSGTDFTLTINSV | | |
| KAEDLAVYYCQQYYSYRTFGGGTKLEIKR | | |
| QVQLQQSGAELMKPGASVKLSCKATGYTFTGYWIEWVKQRPGHGLEWIGEILPG | 235 | 235 |
| SGSTNYNEKFKGKATFTADTSSNTAYMQLSSLTTEDSAIYYCARGRIHYFDYWGQG | | |
| TTLTVSSGGGGSGGGGSGGGGSDVVMTQTPLTLSVTIGQPASISCKSSQSLLDSD | | |
| GKTYLNWLLQRPGQSPKRLIYLVSKLDSGVPDRFTGSGSGTDFTLKISRVEAEDLGV | | |
| YYCWQGTHFPFTFGSGTKLEIKR | | |
| QVQLQQSGAELMKPGASVKLSCKATGYTFTGYWIEWVKQRPGHGLEWIGEILPG | 236 | 236 |
| SGSTNYNEKFKGKATFTADTSSNTAYMQLSSLTTEDSAIYYCARGRIHYFDYWGQG | | |
| TTLTVSSGGGGSGGGGSGGGGSDIVLTQSPASLAVSLGQRATISCKASQSVDYDG | | |
| DSYMNWYQQKPGQPPKLLIYAASNLESGIPARFSGSGSGTDFTLNIHPVEEEDAAT | | |
| YYCQQSNEDPFTFGSGTKLEIKR | | |
| QVQLKQSGPGLVQPSQSLSITCTVSGFSLTSYGVHWVRQSPGKGLEWLGVIWSG | 237 | 237 |
| GSTDYNAAFISRLSISKDNSKSQVFFKMNSLQADDTAIYYCARKGYGYDWYFDVW | | |
| GTGTTVTVSSGGGGSGGGGSGGGGSQLVLTQSSSASFSLGASAKLTCTLSSQHSTY | | |
| TIEWYQQQPLKPPKYVMELKKDGSHSTGDGIPDRFSGSSSGADRYLSISNIQPEDE | | |
| AIYICGVGDTIKEQFVYVFGGGTKVTVLG | | |
| QVQLQQPGAELVMPGASVKLSCKASGYTFTSYWMHWVKQRPGQGLEWIGEID | 238 | 238 |
| PSDSYTNYNQKFKGKATLTVDKSSSTAYMQLSSLTSEDSAVYYCARSSYYYYAMDY | | |
| WGQGTSVTVSSGGGGSGGGGSGGGGSQIVLTQSPAIMSASPGEKVTMTCSASSS | | |
| VSYMHWYQQKSGTSPKRWIYDTSKLASGVPARFSGSGSGTSYSLTISSMEAEDAA | | |
| TYYCQQWSSNPLTFGAGTKLELKR | | |
| DVQLQESGPGLVKPSQSLSLTCSVTGYSITSGYYWNWIRQFPGNKLEWMGYISYD | 239 | 239 |
| GSNNYNPSLKNRISITRDTSKNQFFLKLNSVTTEDTATYYCARGGGRDWGQGTTLT | | |
| VSSGGGGSGGGGSGGGGSEIQMTQSPSSMSASLGDRITITCQATQDIVKNLNWY | | |
| QQKPGKPPSFLIYYATELAEGVPSRFSGSGSGSDYSLTISNLESEDFADYYCLQFYEF | | |
| PLTFGAGTKLELKR | | |
| QVQLKQSGPGLVQPSQSLSITCTVSGFSLTSYGVHWVRQSPGKGLEWLGVIWSG | 240 | 240 |
| GSTDYNAAFISRLSISKDNSKSQVFFKMNSLQADDTAIYYCARGGDYDSYAMDYW | | |
| GQGTSVTVSSGGGGSGGGGSGGGGSDIVLTQSPASLAVSLGQRATISCRASESVD | | |
| NYGISFMNWFQQKPGQPPKLLIYAASNQGSGVPARFSGSGSGTDFSLNIHPMEE | | |
| DDTAMYFCQQSKEVPPTFGGGTKLEIKR | | |
| QVQLQQPGAELVKPGASVKMSCKASGYTFTSYWITWVKQRPGQGLEWIGDIYP | 241 | 241 |
| GSGSTNYNEKFKSKATLTVDTSSSTAYMQLSSLTSEDSAVYYCARESVYDGYSWYF | | |
| DVWGTGTTVTVSSGGGGSGGGGSGGGGSDIVMTQSPATLSVTPGDRVSLSCRA | | |
| SQSISDYLHWYQQKSHESPRLLIKYASQSISGIPSRFSGSGSGSDFTLSINSVEPEDV | | |
| GVYYCQNGHSFPLTFGAGTKLELKR | | |
| EFQLQQSGPELVKPGASVKISCKASGYSFTDYNMNWVKQSNGKSLEWIGVINPNY | 242 | 242 |
| GTTSYNQKFKGKATLTVDQSSSTAYMQLNSLTSEDSAVYYCASTYDYDDWYFDV | | |
| WGTGTTVTVSSGGGGSGGGGSGGGGSDVLMTQTPLSLPVSLGDQASISCRSSQS | | |
| IVHSNGDTYLEWYLQKPGQSPKLLIYKVSNRFSGVPDRFSGSGSGTDFTLKISRVEA | | |
| EDLGVYYCFQGSHVPLTFGAGTKLELKR | | |
| QVQLQQPGAELVMPGASVKLSCKASGYTFTSYWMHWVKQRPGQGLEWIGEID | 243 | 243 |
| PSDSYTNYNQKFKGKATLTVDKSSSTAYMQLSSLTSEDSAVYYCARSGNYLYAMDY | | |
| WGQGTSVTVSSGGGGSGGGGSGGGGSQIVLTQSPAIMSASPGEKVTMTCSASSS | | |
| VSYMHWYQQKSGTSPKRWIYDTSKLASGVPARFSGSGSGTSYSLTISSMEAEDAA | | |
| TYYCQQWSSNPLTFGAGTKLELKR | | |
| EFQLQQSGPELVKPGASVKISCKASGYSFTDYNMNWVKQSNGKSLEWIGVINPNY | 244 | 244 |
| GTTSYNQKFKGKATLTVDQSSSTAYMQLNSLTSEDSAVYYCAREGTSWYFDVWG | | |
| TGTTVTVSSGGGGSGGGGSGGGGSDIVMTQSPTFLAVTASKKVTISCTASESLYSS | | |
| KHKVHYLAWYQKKPEQSPKLLIYGASNRYIGVPDRFTGSGSGTDFTLTISSVQVEDL | | |
| THYYCAQFYSYPYTFGGGTKLEIKR | | |
| QVQLKQSGPGLVQPSQSLSITCTVSGFSLTSYGVHWVRQSPGKGLEWLGVIWRG | 245 | 245 |
| GSTDYNAAFMSRLSITKDNSKSQVFFKMNSLQADDTAIYYCAKKGDGYDWYFDV | | |
| WGTGTTVTVSSGGGGSGGGGSGGGGSQLVLTQSSSASFSLGASAKLTCTLSSQHS | | |
| TYTIEWYQQQPLKPPKYVMELKKDGSHSTGDGIPDRFSGSSSGADRYLSISNIQPE | | |
| DEAIYICGVGDTIKEQFVYVFGGGTKVTVLG | | |
| QVQLKQSGPGLVQPSQSLSITCTVSGFSLTSYGVHWVRQSPGKGLEWLGVIWSG | 246 | 246 |
| GSTDYNAAFISRLSISKDNSKSQVFFKMNSLQADDTAIYYCAREGNYGSSYDAMDY | | |
| WGQGTSVTVSSGGGGSGGGGSGGGGSDIVLTQSPASLAVSLGQRATISCRASQS | | |
| VSTSSYSYMHWYQQKPGQPPKLLIKYASNLESGVPARFSGSGSGTDFTLNIHPVEE | | |
| EDTATYYCQHSWEIPLTFGAGTKLELKR | | |
| QVQLQQPGAELVMPGASVKLSCKASGYTFTSYWMHWVKQRPGQGLEWIGEID | 247 | 247 |
| PSDSYTNYNQKFKGKATLTVDKSSSTAYMQLSSLTSEDSAVYYCARSSNYPYAMDY | | |
| WGQGTSVTVSSGGGGSGGGGSGGGGSQIVLTQSPAIMSASPGEKVTMTCSASSS | | |
| VSYMHWYQQKSGTSPKRWIYDTSKLASGVPARFSGSGSGTSYSLTISSMEAEDAA | | |
| TYYCQQWSSNPLTFGAGTKLELKR | | |
| EVQLQQSVAELVRPGASVKLSCTASGFNIKNTYMHWVKQRPEQGLEWIGRIDPA | 248 | 248 |
| NGNTKYAPKFQGKATITADTSSNTAYLQLSSLTSEDTAIYYCAYYSGLYWGQGTLVT | | |
| VSAGGGGSGGGGSGGGGSDIQMTQSSSYLSVSLGGRVTITCKASDHINNWLAW | | |
| YQQKPGNAPRLLISGATSLETGVPSRFSGSGSGKDYTLSITSLQTEDVATYYCQQY | | |
| WSTPLTFGAGTKLELKR | | |
| QVQLQQPGAELVRPGSSVKLSCKASGYTFTSYWMHWVKQRPIQGLEWIGNIDPS | 249 | 249 |
| DSETHYNQKFKDKATLTVDKSSSTAYMQLSSLTSEDSAVYYCARRGQIYYGYSWFA | | |
| YWGQGTLVTVSAGGGGSGGGGSGGGGSDIQMTQSPASLSASVGETVTITCRASE | | |
| NIYSYLAWYQQKQGKSPQLLVYNAKTLAEGVPSRFSGSGSGTQFSLKINSLQPEDF | | |
| GSYYCQHHYGTPYTFGGGTKLEIKR | | |
| EVQLQQSGPELVKPGASVKISCKASGYTFTDYYMNWVKQSHGKSLEWIGDINPN | 250 | 250 |
| NGGTSYNQKFKGKATLTVDKSSSTAYMELRSLTSEDSAVYYCARSTVVADWYFDV | | |
| WGTGTTVTVSSGGGGSGGGGSGGGGSDIQMTQSPASLSASVGETVTITCRASEN | | |
| IYSYLAWYQQKQGKSPQLLVYNAKTLAEGVPSRFSGSGSGTQFSLKINSLQPEDFG | | |
| SYYCQHHYGTPPTFGGGTKLEIKR | | |
| QVQLQQSGAELARPGASVKLSCKASGYTFTSYGISWVKQRTGQGLEWIGEIYPRS | 251 | 251 |
| GNTYYNEKFKGKATLTADKSSSTAYMELRSLTSEDSAVYFCARSGSSYGYFDVWGT | | |
| GTTVTVSSGGGGSGGGGSGGGGSQIVLTQSPAIMSASPGEKVTMTCSASSSVSY | | |
| MHWYQQKSGTSPKRWIYDTSKLASGVPARFSGSGSGTSYSLTISSMEAEDAATYY | | |
| CQQWSSNPPTFGAGTKLELKR | | |
| QVQLKQSGPGLVQPSQSLSITCTVSGFSLTSYGVHWVRQSPGKGLEWLGVIWSG | 252 | 252 |
| GSTDYNAAFISRLSISKDNSKSQVFFKMNSLQADDTAIYYCARKGGYDAYAMDYW | | |
| GQGTSVTVSSGGGGSGGGGSGGGGSDIVLTQSPASLAVSLGQRATISCRASESVD | | |
| NYGISFMNWFQQKPGQPPKLLIYAASNQGSGVPARFSGSGSGTDFSLNIHPMEE | | |
| DDTAMYFCQQSKEVPPTFGGGTKLEIKR | | |
| EFQLQQSGPELVKPGASVKISCKASGYSFTDYNMNWVKQSNGKSLEWIGVINPNY | 253 | 253 |
| GTTSYNQKFKGKATLTVDQSSSTAYMQLNSLTSEDSAVYYCAREGFITTVVAVDY | | |
| WGQGTTLTVSSGGGGSGGGGSGGGGSDIVMTQSPTFLAVTASKKVTISCTASESL | | |
| YSSKHKVHYLAWYQKKPEQSPKLLIYGASNRYIGVPDRFTGSGSGTDFTLTISSVQV | | |
| EDLTHYYCAQFYSYPYTFGGGTKLEIKR | | |
| QVQLQQSGAELVRPGASVTLSCKASGYTFTDYEMHWVKQTPVHGLEWIGAIDPE | 254 | 254 |
| TGGTAYNQKFKGKAILTADKSSSTAYMELRSLTSEDSAVYYCTREGNYDAMDYWG | | |
| QGTSVTVSSGGGGGGGGSGGGGSQAVVTQESALTTSPGGTVILTCRSSTGAVTT | | |
| SNYANWVQEKPDHLFTGLIGGTSNRAPGVPVRFSGSLIGDKAALTITGAQTEDDA | | |
| MYFCALWYSTHYVFGGGTKVTVLG | | |
| QVQLQQPGAELVRPGTSVKLSCKASGYTFTSYWMHWVKQRPGQGLEWIGVIDP | 255 | 255 |
| SDSYTNYNQKFKGKATLTVDTSSSTAYMQLSSLTSEDSAVYYCARWDYYGVDYW | | |
| GQGTTLTVSSGGGGSGGGGSGGGGSQIVLTQSPAIMSASPGEKVTMTCSASSSIS | | |
| YMHWYQQKPGTSPKRWIYDTSKLASGVPARFSGSGSGTSYSLTISSMEAEDAATY | | |
| YCHQRSSYPTFGAGTKLELKR | | |
| EVQLVESGGGLVQSGGSLRLSCAASGFTFSGYWMYWVRQAPGKGLEWVSAISP | 256 | 256 |
| GGGSTYYPDSVKGRFTISRDNAKNTLYLQMNSLEPEDTALYYCASSLTATHTYEYDY | | |
| WGQGTQVTVSS | | |
| QVQLVQSGAEVKKPGASVKVSCKASGGTFSSYAISWVRQAPGQCLEWMGWINP | 257 | 9316 |
| NSGGTNYAQKFQGRVTMTRDTSTSTVYMELSSLRSEDTAVYYCARDGYSGSYSD | | |
| WGQGTLVTVSSGGGGSGGGGSGGGGSDIVMTQSPDSLAVSLGERATINCKSSQS | | |
| VLSSSYNKNYLAWYQQKPGQPPKLLIYWASTRESGVPDRFSGSGSGTDFTLTISSL | | |
| QAEDVAVYYCQQYYSTPWTFGCGTKVEIKR | | |
| QVQLVQSGAEVKKPGSSVKVSCKASGYTFTSYDINWVRQAPGQCLEWMGGIIPL | 258 | 9317 |
| SGAPNYAHKFQGRVTITADESTSTAYMELSSLRSEDTAVYYCARGALYNWNDGW | | |
| FDPWGQGTLVTVSSGGGGSGGGGSGGGGSDIQMTQSPSSLSASVGDRVTITCRA | | |
| SQDIGDYLAWYQQKPGKAPKLLIYDASSLQSGVPSRFSGSGSGTDFTLTISSLQPED | | |
| FATYYCQQANSFPLTFGCGTKVEIKR | | |
| QVQLVQSGAEVKKPGASVKVSCKASGYSLITHWMHWVRQAPGQCLEWMGMI | 259 | 9318 |
| NPSDGVTYYAQTFQGRVTMTRDTSTSTVYMELSSLRSEDTAVYYCAREYYGEGFD | | |
| YWGQGTLVTVSSGGGGSGGGGSGGGGSDIQMTQSPSSLSASVGDRVTITCRAS | | |
| QGISNYLAWYQQKPGKAPKLLIYSASNLQSGVPSRFSGSGSGTDFTLTISSLQPEDF | | |
| ATYYCQQSYSTPLTFGCGTKVEIKR | | |
| QVQLVQSGAEVKKPGSSVKVSCKASGYTFSDHHVHWVRQAPGQGLEWMGGIIP | 260 | 9319 |
| IFGTANYAQKFQGRVTITADESTSTAYMELSSLRSEDTAVYYCARGSSWYLHFQH | | |
| WGQGTLVTVSSGGGGSGGGGSGGGGSDIQMTQSPSSLSASVGDRVTITCRASQ | | |
| GIASYLAWYQQKPGKAPKLLIYAASTLQPGVPSRFSGSGSGTDFTLTISSLQPEDFA | | |
| TYYCQQFDSYPITFGQGTKVEIKR | | |
| QVQLVQSGAEVKKPGASVKVSCKASGGTFSRYGIAWVRQAPGQGLEWMGISYP | 261 | 9320 |
| SDGSTSSAQKLQGRVTMTRDTSTSTVYMELSSLRSEDTAVYYCARDRLGDLDYWG | | |
| QGTLVTVSSGGGGSGGGGSGGGGSDIQMTQSPSSLSASVGDRVTITCRASQSISS | | |
| WLAWYQQKPGKAPKLLIYAASTLQSGVPSRFSGSGSGTDFTLTISSLQPEDFATYYC | | |
| QQGYSTPYIFGQGTKVEIKR | | |
| QVQLVQSGAEVKKPGSSVKVSCKASGYTFTDYYVHWVRQAPGQGLEWVGWIST | 262 | 9321 |
| FTGNTDYAQNFQGRVTITADESTSTAYMELSSLRSEDTAVYYCARDAPLAAAGTDY | | |
| YYGMDVWGQGTTVTVSSGGGGSGGGGSGGGGSDIQMTQSPSSLSASVGDRVTI | | |
| TCRASQGISNYLAWYQQKPGKAPKLLIYKASSLESGVPSRFSGSGSGTDFTLTISSLQ | | |
| PEDFATYYCQQSYNTPFTFGQGTRLEIKR | | |
| QVQLVQSGAEVKKPGASVKVSCKASGGTFSSYALSWVRQAPGQGLEWMGIINPS | 263 | 9322 |
| GGTNYAQKFQGRVTMTRDTSTSTVYMELSSLRSEDTAVYYCARDLGDPGMDVW | | |
| GQGTLVTVSSGGGGSGGGGSGGGGSDIQMTQSPSSLSASVGDRVTITCRASQDIS | | |
| NYLNWYQQKPGKAPKLLIYDASNLETGVPSRFSGSGSGTDFTLTISSLQPEDFATYY | | |
| CQQSYSTPLTFGQGTKVEIKR | | |
| QVQLVQSGAEVKKPGASVKVSCKASGGTFSSYAISWVRQAPGQGLEWMGWINP | 264 | 9323 |
| NSGGTNYAQKFQGRVTMTRDTSTSTVYMELSSLRSEDTAVYYCARDGYSGSYSD | | |
| WGQGTLVTVSSGGGGSGGGGSGGGGSDIVMTQSPDSLAVSLGERATINCKSSQS | | |
| VLSSSYNKNYLAWYQQKPGQPPKLLIYWASTRESGVPDRFSGSGSGTDFTLTISSL | | |
| QAEDVAVYYCQQYYSTPWTFGQGTKVEIKR | | |
| QVQLVQSGAEVKKPGASVKVSCKASGGTFSSYALSWVRQAPGQGLEWMGIINPS | 265 | 9324 |
| GGTNYAQKFQGRVTMTRDTSTSTVYMELSSLRSEDTAVYYCARDLGDPGMDVW | | |
| GQGTLVTVSSGGGGSGGGGSGGGGSDIQMTQSPSSLSASVGDRVTITCRASQDIS | | |
| NYLNWYQQKPGKAPKLLIYDASNLETGVPSRFSGSGSGTDFTLTISSLQPEDFATYY | | |
| CQQSYSTPLTFGQGTKVEIK | | |
| QVQLVQSGAEVKKPGASVKVSCKASGGTFSNYAISWVRQAPGQGLEWMGIIDPS | 266 | 9325 |
| GGSTTYAQKFQGRVTMTRDTSTSTVYMELSSLRSEDTAVYYCARDLGDMGMDV | | |
| WGQGTTVTVSSGGGGSGGGGSGGGGSDIQMTQSPSSLSASVGDRVTITCRASQ | | |
| SISSYLNWYQQKPGKAPKLLIYAASSLQSGVPSRFSGSGSGTDFTLTISSLQPEDFAT | | |
| YYCQQSYSTPLTFGGGTKVEIK | | |
| QVQLVQSGAEVKKPGASVKVSCKASGGTFSNYAFSWVRQAPGQGLEWMGIINP | 267 | 9326 |
| SGGSTSYAQKFQGRVTMTRDTSTSTVYMELSSLRSEDTAVYYCARDVGDRGMDV | | |
| WGQGTTVTVSSGGGGSGGGGSGGGGSDIQMTQSPSSLSASVGDRVTITCQASQ | | |
| DISNYLNWYQQKPGKAPKLLIYKASSLETGVPSRFSGSGSGTDFTLTISSLQPEDFAT | | |
| YYCQQSFSSPLTFGQGTKVEIK | | |
| QVQLVQSGAEVKKPGASVKVSCKASGSTFSGYYMHWVRQAPGQGLEWMGWI | 268 | 9327 |
| DPNGGGTQYAQKFQGRVTMTRDTSTSTVYMELSSLRSEDTAVYYCAKDIVHDGT | | |
| EYFQHWGQGTLVTVSSGGGGSGGGGSGGGGSDIQMTQSPSSLSASVGDRVTITC | | |
| RASQNVNTWLAWYQQKPGKAPKLLIYEASSLQSGVPSRFSGSGSGTDFTLTISSLQ | | |
| PEDFATYYCQQANSFPFTFGQGTKLEIK | | |
| QVQLVQSGAEVKKPGASVKVSCKASGYTFTSYYMHWVRQAPGQGLEWMGIINP | 269 | 9328 |
| SGGSTSYAQKFQGRVTMTRDTSTSTVYMELSSLRSEDTAVYYCAKDIVHDGTEYF | | |
| QHWGQGTLVTVSSGGGGGGGGSGGGGSDIQMTQSPSSLSASVGDRVTITCRA | | |
| SQSISDWLAWYQQKPGKAPKLLIYAASSLQSGVPSRFSGSGSGTDFTLTISSLQPED | | |
| FATYYCAQHNHYPYTFGQGTRLEIK | | |
| QVQLVQSGAEVKKPGASVKVSCKASGGTFSSYAISWVRQAPGQGLEWMGIINPS | 270 | 9329 |
| GGSTNYAQKFQGRVTMTRDTSTSTVYMELSSLRSEDTAVYYCAREGRDHDAFDI | | |
| WGQGTMVTVSSGGGGSGGGGSGGGGSDIVMTQSPDSLAVSLGERATINCKSSQ | | |
| SVLSSSYNKNYLAWYQQKPGQPPKLLIYWASTRESGVPDRFSGSGSGTDFTLTISSL | | |
| QAEDVAVYYCQQYYTTPFTFGQGTKVEIK | | |
| QVQLVQSGAEVKKPGASVKVSCKASGFTFTDYGISWVRQAPGQGLEWMGIINPS | 271 | 9330 |
| GGSTSYAQKFQGRVTMTRDTSTSTVYMELSSLRSEDTAVYYCAREGRSHDAFDIW | | |
| GQGTMVTVSSGGGGSGGGGSGGGGSDIVMTQSPDSLAVSLGERATINCKSSQSV | | |
| LSSSYNKNYLAWYQQKPGQPPKLLIYWASTRASGVPDRFSGSGSGTDFTLTISSLQ | | |
| AEDVAVYYCQQYYSTPFTFGQGTKLEIK | | |
| QVQLVQSGAEVKKPGASVKVSCKASGYTFTGYYMHWVRQAPGQGLEWMGW | 272 | 9331 |
| MNPHSGDTGYAQKFQGRVTMTRDTSTSTVYMELSSLRSEDTAVYYCARWVGTT | | |
| EYYYYYYMDVWGKGTTVTVSSGGGGSGGGGSGGGGSDIQMTQSPSSLSASVGD | | |
| RVTITCRASQAIRDDLGWYQQKPGKAPKLLIYDASHLEAGVPSRFSGSGSGTDFTL | | |
| TISSLQPEDFATYYCQQANSFPITFGQGTRLEIK | | |
| QVQLVQSGAEVKKPGASVKVSCKASGYTFTDYYLHWVRQAPGQGLEWMGIIDPS | 273 | 9332 |
| GGSTSIAQKFQGRVTMTRDTSTSTVYMELSSLRSEDTAVYYCATTAYYDFWSGYS | | |
| MDVWGKGTTVTVSSGGGGSGGGGSGGGGSDIQMTQSPSSLSASVGDRVTITCR | | |
| ASQGVGNDLAWYQQKPGKAPKLLIYAASTLQTGVPSRFSGSGSGTDFTLTISSLQP | | |
| EDFATYYCQQASSFPLTFGPGTKVDIK | | |
| QVQLVQSGAEVKKPGASVKVSCKASGYTFTSHYMHWVRQAPGQGLEWMGIIDP | 274 | 9333 |
| SGGSTSYAQEFQGRVTMTRDTSTSTVYMELSSLRSEDTAVYYCARDMDNWNTGY | | |
| YYYMDVWGKGTTVTVSSGGGGSGGGGSGGGGSDIQMTQSPSSLSASVGDRVTI | | |
| TCRASQIIGTNLAWYQQKPGKAPKLLIYAASSLQSGVPSRFSGSGSGTDFTLTISSLQ | | |
| PEDFATYYCQQSYTFPVTFGQGTKLEIK | | |
| QVQLVQSGAEVKKPGASVKVSCKASGGTFSSYAINWVRQAPGQGLEWMGWVN | 275 | 9334 |
| PNSGDTAYAQKFQGRVTMTRDTSTSTVYMELSSLRSEDTAVYYCARDQRGGDA | | |
| WDVWGKGTTVTVSSGGGGSGGGGSGGGGSDIQMTQSPSSLSASVGDRVTITCR | | |
| ASQSISTWLAWYQQKPGKAPKLLIYDASSLESGVPSRFSGSGSGTDFTLTISSLQPE | | |
| DFATYYCQQSYSTPFTFGPGTKVDIK | | |
| QVQLVQSGAEVKKPGSSVKVSCKASGGTFSNYAISWVRQAPGQGLEWMGIITPS | 276 | 9335 |
| GGSTTYAHKFQGRVTITADESTSTAYMELSSLRSEDTAVYYCARDTAGHFDIWGQ | | |
| GTLVTVSSGGGGSGGGGSGGGGSDIVMTQSPDSLAVSLGERATINCKSSQSVLSS | | |
| SNNKNYLAWYQQKPGQPPKLLIYWASTRESGVPDRFSGSGSGTDFTLTISSLQAED | | |
| VAVYYCQQYYGSPLTFGPGTKVDIK | | |
| QVQLVQSGAEVKKPGASVKVSCKASGGTFRNDVINWVRQAPGQGLEWIGWMN | 277 | 9336 |
| PNSGNTGYAQKFQGRVTMTRDTSTSTVYMELSSLRSEDTAVYYCARDNPDLDGM | | |
| DVWGQGTLVTVSSGGGGSGGGGSGGGGSDIVMTQSPDSLAVSLGERATINCKSS | | |
| QSVLSSSYNKNYLAWYQQKPGQPPKLLIYWASTRESGVPDRFSGSGSGTDFTLTIS | | |
| SLQAEDVAVYYCQQYYSSPPTFGQGTRLEIK | | |
| QVQLVQSGAEVKKPGASVKVSCKASGGTFSSYAINWVRQAPGQGLEWLGWISA | 278 | 9337 |
| YNGNTNYAQKFQGRVTMTRDTSTSTVYMELSSLRSEDTAVYYCARDLVGHFDYW | | |
| GQGTLVTVSSGGGGSGGGGSGGGGSDIVMTQSPDSLAVSLGERATINCKSSQSVL | | |
| SSSYNKNYLAWYQQKPGQPPKLLIYWASTRESGVPDRFSGSGSGTDFTLTISSLQA | | |
| EDVAVYYCQQYYSSPPTFGGGTKVEIK | | |
| QVQLVQSGAEVKKPGASVKVSCKASGGTFSSYAISWVRQAPGQGLEWMGWINP | 279 | 9338 |
| NSGGTNYAQKFQGRVTMTRDTSTSTVYMELSSLRSEDTAVYYCARDGYSGSYSD | | |
| WGQGTLVTVSSGGGGSGGGGSGGGGSDIVMTQSPDSLAVSLGERATINCKSSQS | | |
| VLSSSYNKNYLAWYQQKPGQPPKLLIYWASTRESGVPDRFSGSGSGTDFTLTISSL | | |
| QAEDVAVYYCQQYYSTPWTFGQGTKVEIK | | |
| QVQLVQSGAEVKKPGASVKVSCKASGNTLSSHAISWVRQAPGQGLEWMGIINPS | 280 | 9339 |
| GGSTSYAQKFQGRVTMTRDTSTSTVYMELSSLRSEDTAVYYCARDQGSSGTFDY | | |
| WGQGTLVTVSSGGGGSGGGGSGGGGSDIVMTQSPDSLAVSLGERATINCKSSQS | | |
| VLSSSYNKNYLAWYQQKPGQPPKLLIYWASTRASGVPDRFSGSGSGTDFTLTISSL | | |
| QAEDVAVYYCQQYYGSPPTFGQGTRLEIK | | |
| QVQLVQSGAEVKKPGASVKVSCKASGGTLSSYAISWVRQAPGQGLEWMGWINP | 281 | 9340 |
| NSGGTNYAQKFQGRVTMTRDTSTSTVYMELSSLRSEDTAVYYCARDSTDVIDYW | | |
| GQGTLVTVSSGGGGSGGGGSGGGGSDIQMTQSPSSLSASVGDRVTITCQASQDI | | |
| RNYLNWYQQKPGKAPKLLIYDASTLQSGVPSRFSGSGSGTDFTLTISSLQPEDFATY | | |
| YCQQAYSFPWTFGQGTKLEIK | | |
| QVQLVQSGAEVKKPGASVKVSCKASGYIFTSYDINWVRQAPGQGLEWMGWINP | 282 | 9341 |
| NSGDTKYAQNFQGRVTMTRDTSTSTVYMELSSLRSEDTAVYYCARDGGTVTPTEE | | |
| YYYYGMDVWGQGTLVTVSSGGGGSGGGGSGGGGSDIQMTQSPSSLSASVGDR | | |
| VTITCQASQDISNYLNWYQQKPGKAPKLLIYNASNLETGVPSRFSGSGSGTDFTLTI | | |
| SSLQPEDFATYYCQQLNSYPFTFGGGTKVEIK | | |
| QVQLVQSGAEVKKPGASVKVSCKASGGTFSSYAISWVRQAPGQGLEWMGWISV | 283 | 9342 |
| YNGNTNYAQNLQGRVTMTRDTSTSTVYMELSSLRSEDTAVYYCASLDDLDYWGQ | | |
| GTLVTVSSGGGGSGGGGSGGGGSDIQMTQSPSSLSASVGDRVTITCQASQSISTW | | |
| LAWYQQKPGKAPKLLIYAASTLRSGVPSRFSGSGSGTDFTLTISSLQPEDFATYYCL | | |
| QHYTYPLTFGQGTRLEIK | | |
| QVQLVQSGAEVKKPGASVKVSCKASGHTFTSYYIHWVRQAPGQGLEWMGWIN | 284 | 9343 |
| PNNGGTHYAQKFQGRVTMTRDTSTSTVYMELSSLRSEDTAVYYCARDMVRDSAE | | |
| YFQHWGQGTLVTVSSGGGGSGGGGSGGGGSDIQMTQSPSSLSASVGDRVTITC | | |
| RASEDISTYLAWYQQKPGKAPKLLIYAASTLQSGVPSRFSGSGSGTDFTLTISSLQPE | | |
| DFATYYCQQSHTIPWTFGQGTRLEIK | | |
| QVQLVQSGAEVKKPGSSVKVSCKASGYTFITSYIHWVRQAPGQGLEWMGMINPS | 285 | 9344 |
| GGTTTYAQKFQGRVTITADESTSTAYMELSSLRSEDTAVYYCARDSSGYPIDYWGQ | | |
| GTLVTVSSGGGGSGGGGSGGGGSDIQMTQSPSSLSASVGDRVTITCRASHHISDF | | |
| LNWYQQKPGKAPKLLIYAASTLQSGVPSRFSGSGSGTDFTLTISSLQPEDFATYYCQ | | |
| QSYSSPYTFGQGTKLEIK | | |
| QVQLVQSGAEVKKPGSSVKVSCKASGYTFTSYDINWVRQAPGQGLEWMGGIIPL | 286 | 9345 |
| SGAPNYAHKFQGRVTITADESTSTAYMELSSLRSEDTAVYYCARGALYNWNDGW | | |
| FDPWGQGTLVTVSSGGGGSGGGGSGGGGSDIQMTQSPSSLSASVGDRVTITCRA | | |
| SQDIGDYLAWYQQKPGKAPKLLIYDASSLQSGVPSRFSGSGSGTDFTLTISSLQPED | | |
| FATYYCQQANSFPLTFGGGTKVEIK | | |
| EVQLLESGGGLVQPGGSLRLSCAASGFTVGSWYMSWVRQAPGKGLEWVAGIWY | 287 | 9346 |
| EGSNKYYADSVKGRFTISRDNSKNTLYLQMNSLRAEDTAVYYCARLGTASLPYFDY | | |
| WGQGTLVTVSSGGGGSGGGGSGGGGSDIQMTQSPSSLSASVGDRVTITCRASQ | | |
| DIRSYLAWYQQKPGKAPKLLIYAASSLQSGVPSRFSGSGSGTDFTLTISSLQPEDFAT | | |
| YYCQQSYTAPPTFGQGTRLEIK | | |
| QVQLVQSGAEVKKPGASVKVSCKASGYTFTGYYMHWVRQAPGQGLEWVGWIN | 288 | 9347 |
| PNRGDTKYAQKFQGRVTMTRDTSTSTVYMELSSLRSEDTAVYYCARESGDGFDP | | |
| WGQGTLVTVSSGGGGSGGGGSGGGGSDIQMTQSPSSLSASVGDRVTITCRASQ | | |
| DISNNLNWYQQKPGKAPKLLIYAASTLQSGVPSRFSGSGSGTDFTLTISSLQPEDFA | | |
| TYYCLQHNTYPLTFGQGTKLEIK | | |
| QVQLVQSGAEVKKPGSSVKVSCKASGYTFTNYYIHWVRQAPGQGLEWMGWM | 289 | 9348 |
| NPNSGNTGYAQKFQGRVTITADESTSTAYMELSSLRSEDTAVYYCARDWPNWFD | | |
| PWGQGTLVTVSSGGGGSGGGGSGGGGSDIQMTQSPSSLSASVGDRVTITCRAS | | |
| QDISNWLAWYQQKPGKAPKLLIYDASSLQSGVPSRFSGSGSGTDFTLTISSLQPED | | |
| FATYYCQQAISFPLTFGGGTKVEIK | | |
| QVQLVQSGAEVKKPGASVKVSCKASGYSFTDNYIHWVRQAPGQGLEWMGWIRS | 290 | 9349 |
| DNGETSYAQKFQGRVTMTRDTSTSTVYMELSSLRSEDTAVYYCAREVQLVGFDY | | |
| WGQGTLVTVSSGGGGSGGGGSGGGGSDIQMTQSPSSLSASVGDRVTITCRASQ | | |
| GIANYLAWYQQKPGKAPKLLIYAASSLQSGVPSRFSGSGSGTDFTLTISSLQPEDFA | | |
| TYYCQQADSFPLTFGQGTKVEIK | | |
| QVQLVQSGAEVKKPGSSVKVSCKASGYTFSDHHVHWVRQAPGQGLEWMGGIIP | 291 | 9350 |
| IFGTANYAQKFQGRVTITADESTSTAYMELSSLRSEDTAVYYCARGSSWYLHFQH | | |
| WGQGTLVTVSSGGGGSGGGGSGGGGSDIQMTQSPSSLSASVGDRVTITCRASQ | | |
| GIASYLAWYQQKPGKAPKLLIYAASTLQPGVPSRFSGSGSGTDFTLTISSLQPEDFA | | |
| TYYCQQFDSYPITFGQGTKVEIK | | |
| QVQLVQSGAEVKKPGSSVKVSCKASGGTFSSYAIYWVRQAPGQGLEWMGGIIPIF | 292 | 9351 |
| GTTNYAQKFQGRVTITADESTSTAYMELSSLRSEDTAVYYCAKGVDRYNWNDAFD | | |
| YWGQGTLVTVSSGGGGSGGGGSGGGGSDIQMTQSPSSLSASVGDRVTITCRAS | | |
| QGISNYLAWYQQKPGKAPKLLIYAASRLQSGVPSRFSGSGSGTDFTLTISSLQPEDF | | |
| ATYYCQQSSIIPFTFGQGTKLEIK | | |
| QVQLVQSGAEVKKPGASVKVSCKASGYTFTDYYMHWVRQAPGQGLEWMGWI | 293 | 9352 |
| HSNSGGTHSAQKFQGRVTMTRDTSTSTVYMELSSLRSEDTAVYYCARESSGYDSS | | |
| LDYWGQGTLVTVSSGGGGSGGGGSGGGGSDIQMTQSPSSLSASVGDRVTITCRA | | |
| SQGISNYLAWYQQKPGKAPKLLIYAASTLQSGVPSRFSGSGSGTDFTLTISSLQPED | | |
| FATYYCQQAYSFPYTFGQGTKLEIK | | |
| QVQLVQSGAEVKKPGASVKVSCKASGGTFSSYGISWVRQAPGQGLEWVGWINP | 294 | 9353 |
| NSGDTDYAQKFQGRVTMTRDTSTSTVYMELSSLRSEDTAVYYCTTDPRLDSSDPG | | |
| YWGQGTLVTVSSGGGGSGGGGSGGGGSDIQMTQSPSSLSASVGDRVTITCRAS | | |
| QSIGRWLAWYQQKPGKAPKLLIYDASNLETGVPSRFSGSGSGTDFTLTISSLQPEDF | | |
| ATYYCQQSYSTPRTFGQGTKVEIK | | |
| QVQLVQSGAEVKKPGASVKVSCKASGGTFGNYGINWVRQAPGQGLEWMGWIS | 295 | 9354 |
| AYNGNTNYAQKFQGRVTMTRDTSTSTVYMELSSLRSEDTAVYYCARGGMDVWG | | |
| QGTLVTVSSGGGGSGGGGSGGGGSDIQMTQSPSSLSASVGDRVTITCRASQSINS | | |
| WLAWYQQKPGKAPKLLIYDTSSLQSGVPSRFSGSGSGTDFTLTISSLQPEDFATYYC | | |
| QQTYSTPYTFGQGTKLEIK | | |
| QVQLVQSGAEVKKPGASVKVSCKASGGTFSRYGIAWVRQAPGQGLEWMGISYP | 296 | 9355 |
| SDGSTSSAQKLQGRVTMTRDTSTSTVYMELSSLRSEDTAVYYCARDRLGDLDYWG | | |
| QGTLVTVSSGGGGSGGGGSGGGGSDIQMTQSPSSLSASVGDRVTITCRASQSISS | | |
| WLAWYQQKPGKAPKLLIYAASTLQSGVPSRFSGSGSGTDFTLTISSLQPEDFATYYC | | |
| QQGYSTPYIFGQGTKVEIK | | |
| QVQLVQSGAEVKKPGASVKVSCKASGGTFSSYAISWVRQAPGQGLEWMGWMN | 297 | 9356 |
| PNSGNTGYAQKFQGRVTMTRDTSTSTVYMELSSLRSEDTAVYYCARDSIVGGYPF | | |
| DYWGQGTLVTVSSGGGGSGGGGSGGGGSDIQMTQSPSSLSASVGDRVTITCRAS | | |
| QSISSYLNWYQQKPGKAPKLLIYAASSLQSGVPSRFSGSGSGTDFTLTISSLQPEDFA | | |
| TYYCQQTDSIPITFGQGTRLEIK | | |
| QVQLVQSGAEVKKPGSSVKVSCKASGYTFTSYDINWVRQAPGQGLEWMGTITPI | 298 | 9357 |
| FGTTDYAQKFQGRVTITADESTSTAYMELSSLRSEDTAVYYCAREGYSSSWHDDAF | | |
| DIWGQGTLVTVSSGGGGSGGGGSGGGGSDIQMTQSPSSLSASVGDRVTITCRAS | | |
| QSISSYLNWYQQKPGKAPKLLIYAASTLQSGVPSRFSGSGSGTDFTLTISSLQPEDFA | | |
| TYYCQQSYSIPYTFGQGTKVEIK | | |
| QVQLVQSGAEVKKPGASVKVSCKASGGTFSNYAISWVRQAPGQGLEWMGIIDPS | 299 | 9358 |
| GGSTSYAQKFQGRVTMTRDTSTSTVYMELSSLRSEDTAVYYCARDLGDYGLDSW | | |
| GQGTLVTVSSGGGGSGGGGSGGGGSDIQMTQSPSSLSASVGDRVTITCRASQTIR | | |
| SYLNWYQQKPGKAPKLLIYKASSLESGVPSRFSGSGSGTDFTLTISSLQPEDFATYYC | | |
| QQTYTIPITFGPGTKVDIK | | |
| QVQLVQSGAEVKKPGASVKVSCKASGYTFTGYYMHWVRQAPGQGLEWMGW | 300 | 9359 |
| MNPNSGDTGYAQRFQGRVTMTRDTSTSTVYMELSSLRSEDTAVYYCATGGSDSS | | |
| GYYYEGYFQHWGQGTLVTVSSGGGGSGGGGSGGGGSDIQMTQSPSSLSASVGD | | |
| RVTITCRASQTISNWLAWYQQKPGKAPKLLIYAASTLQSGVPSRFSGSGSGTDFTL | | |
| TISSLQPEDFATYYCQQANSFPPTFGQGTKVEIK | | |
| QVQLVQSGAEVKKPGASVKVSCKASGGTFSSYAISWVRQAPGQGLEWLGYMSP | 301 | 9360 |
| NSGNTGYAQKFQGRVTMTRDTSTSTVYMELSSLRSEDTAVYYCARDKGGYYDSS | | |
| GYYWYWGQGTLVTVSSGGGGSGGGGSGGGGSDIQMTQSPSSLSASVGDRVTIT | | |
| CRASQYIGSYLNWYQQKPGKAPKLLIYDASNLETGVPSRFSGSGSGTDFTLTISSLQ | | |
| PEDFATYYCQQVDSYPLTFGGGTKVEIK | | |
| EVQLLESGGGLVQPGGSLRLSCAASGFSLSSYEMHWVRQAPGKGLEWVSAISSN | 302 | 9361 |
| GGSTYYADSVKGRFTISRDNSKNTLYLQMNSLRAEDTAVYYCARVGDGDGYNPDF | | |
| DYWGQGTLVTVSSGGGGSGGGGSGGGGSDIVMTQSPLSLPVTPGEPASISCRSS | | |
| QSLLHSNGYNYLDWYLQKPGQSPQLLIYLGSNRASGVPDRFSGSGSGTDFTLKISR | | |
| VEAEDVGVYYCMQGTHWPPTFGQGTKLEIK | | |
| QVQLVQSGAEVKKPGSSVKVSCKASGYTFTSYGISWVRQAPGQGLEWMGWIDP | 303 | 9362 |
| TSGATDTAHKFQGRVTITADESTSTAYMELSSLRSEDTAVYYCAKDPIVATEVDYW | | |
| GQGTLVTVSSGGGGSGGGGSGGGGSDIVMTQSPLSLPVTPGEPASISCRSSQSLL | | |
| HSNGYNYLDWYLQKPGQSPQLLIYFGSNRASGVPDRFSGSGSGTDFTLKISRVEAE | | |
| DVGVYYCMQALQAPVSFGQGTRLEIK | | |
| QVQLVQSGAEVKKPGASVKVSCKASGGTFSSYAISWVRQAPGQGLEWMGWMS | 304 | 9363 |
| PNSGNTGYAQKFQGRVTMTRDTSTSTVYMELSSLRSEDTAVYYCARDSGAFDIW | | |
| GQGTMVTVSSGGGGSGGGGSGGGGSDIVMTQSPDSLAVSLGERATINCKSSQSV | | |
| LSSSYNKNYLAWYQQKPGQPPKLLIYWASSRQSGVPDRFSGSGSGTDFTLTISSLQ | | |
| AEDVAVYYCQQYYSTPLTFGQGTKVEIK | | |
| QVQLVQSGAEVKKPGASVKVSCKASGVTISNYAISWVRQAPGQGLEWMGWMN | 305 | 9364 |
| PNSGNTGYAQKFQGRVTMTRDTSTSTVYMELSSLRSEDTAVYYCAREGLLDAFDI | | |
| WGQGTMVTVSSGGGGSGGGGSGGGGSDIVMTQSPDSLAVSLGERATINCKSSQ | | |
| SVSSSSYNKNYLAWYQQKPGQPPKLLIYWASVRESGVPDRFSGSGSGTDFTLTISSL | | |
| QAEDVAVYYCQQYYSTPITFGQGTRLEIK | | |
| QVQLVQSGAEVKKPGASVKVSCKASGGTFSRYGITWVRQAPGQGLEWMGWM | 306 | 9365 |
| NPYDGNTGYAQKFQGRVTMTRDTSTSTVYMELSSLRSEDTAVYYCARGGRHHDA | | |
| FDIWGQGTMVTVSSGGGGSGGGGSGGGGSDIVMTQSPDSLAVSLGERATINCK | | |
| STQNVLSSSNNNSYLAWYQQKPGQPPKLLIYWASTRESGVPDRFSGSGSGTDFTL | | |
| TISSLQAEDVAVYYCQQYYSTPFTFGQGTRLEIK | | |
| QVQLVQSGAEVKKPGASVKVSCKASGGTFSSYAISWVRQAPGQGLEWMGIINPS | 307 | 9366 |
| GDGTNYAQKFQGRVTMTRDTSTSTVYMELSSLRSEDTAVYYCARDISNDAFDIW | | |
| GQGTMVTVSSGGGGSGGGGSGGGGSDIQMTQSPSSLSASVGDRVTITCQASQD | | |
| IGNYLNWYQQKPGKAPKLLIYAASSLQSGVPSRFSGSGSGTDFTLTISSLQPEDFAT | | |
| YYCQQTYNTPLTFGGGTKLEIK | | |
| QVQLVQSGAEVKKPGASVKVSCKASGYILTGHYMHWVRQAPGQGLEWMGWIS | 308 | 9367 |
| AYNGDTNYAQKFQGRVTMTRDTSTSTVYMELSSLRSEDTAVYYCARGSSWDDAF | | |
| DIWGQGTMVTVSSGGGGSGGGGSGGGGSDIQMTQSPSSLSASVGDRVTITCQA | | |
| SQDISNYLNWYQQKPGKAPKLLIYEASTLQSGVPSRFSGSGSGTDFTLTISSLQPED | | |
| FATYYCQQSYSTPFTFGPGTKVDIK | | |
| EVQLVESGGGLVKPGGSLRLSCAASGFTFSNHYTSWVRQAPGKGLEWVSAIGAG | 309 | 9368 |
| GGTYYADSVKGRFTISRDDSKNTLYLQMNSLKTEDTAVYYCAREGWNDDVFDIW | | |
| GQGTMVTVSSGGGGSGGGGSGGGGSDIQMTQSPSSLSASVGDRVTITCQASQD | | |
| ISTWLAWYQQKPGKAPKLLIYRASTLESGVPSRFSGSGSGTDFTLTISSLQPEDFATY | | |
| YCQQSYSIPLTFGGGTKVEIK | | |
| QVQLVQSGAEVKKPGASVKVSCKASGGTFSSYAISWVRQAPGQGLEWVGIINPS | 310 | 9369 |
| AGTTYYAERFQGRVTMTRDTSTSTVYMELSSLRSEDTAVYYCARDGNFGAFDIWG | | |
| QGTMVTVSSGGGGSGGGGSGGGGSDIQMTQSPSSLSASVGDRVTITCRASQNIN | | |
| NYLNWYQQKPGKAPKLLIYAASRLQSGVPSRFSGSGSGTDFTLTISSLQPEDFATYY | | |
| CQQSYSAPVTFGQGTKLEIK | | |
| QVQLVQSGAEVKKPGSSVKVSCKASGYSFTTYAITWVRQAPGQGLEWMGEIIPIF | 311 | 9370 |
| GTANYAQKFQGRVTITADESTSTAYMELSSLRSEDTAVYYCARDKSGWNYGSGSY | | |
| NDAFDIWGQGTMVTVSSGGGGSGGGGSGGGGSDIQMTQSPSSLSASVGDRVTI | | |
| TCRASQNINTWLAWYQQKPGKAPKLLIYAASSLQSGVPSRFSGSGSGTDFTLTISSL | | |
| QPEDFATYYCQQAYSFPFTFGPGTKVDIK | | |
| QVQLVQSGAEVKKPGASVKVSCKASGYAFTGYYMHWVRQAPGQGLEWMGW | 312 | 9371 |
| MNPNSGKTEYAQKFQGRVTMTRDTSTSTVYMELSSLRSEDTAVYYCARDGGLDF | | |
| DYWGQGTMVTVSSGGGGSGGGGSGGGGSDIQMTQSPSSLSASVGDRVTITCRA | | |
| SQRIGNYLNWYQQKPGKAPKLLIYAASSLQSGVPSRFSGSGSGTDFTLTISSLQPED | | |
| FATYYCQQSYSTPLTFGGGTKVEIK | | |
| QVQLVQSGAEVKKPGASVKVSCKASGYTFTTYYIHWVRQAPGQGLEWMGWMN | 313 | 9372 |
| PNTGDTGSAQKFQGRVTMTRDTSTSTVYMELSSLRSEDTAVYYCAKDPAVTPDAF | | |
| DIWGQGTMVTVSSGGGGSGGGGSGGGGSDIQMTQSPSSLSASVGDRVTITCRA | | |
| SQSISTYLNWYQQKPGKAPKLLIYAASTLQSGVPSRFSGSGSGTDFTLTISSLQPEDF | | |
| ATYYCQQSYRTVTFGQGTRLEIK | | |
| QVQLVQSGAEVKKPGASVKVSCKASGGTLSSYAISWVRQAPGQGLEWMGIIDPS | 314 | 9373 |
| GGGTSYAQKLQGRVTMTRDTSTSTVYMELSSLRSEDTAVYYCAGSLYYYGMDVW | | |
| GQGTMVTVSSGGGGSGGGGSGGGGSEIVMTQSPATLSVSPGERATLSCRASQSV | | |
| GSYLAWYQQKPGQAPRLLIYGASTRATGIPARFSGSGSGTEFTLTISSLQSEDFAVY | | |
| YCQQYDSSSQTFGQGTKVEIK | | |
| QVQLVQSGAEVKKPGSSVKVSCKASGGTFGSSAISWVRQAPGQGLEWMGGIIPIF | 315 | 9374 |
| GTANYAQKFQGRVTITADESTSTAYMELSSLRSEDTAVYYCAKEDDILPPRAFDIW | | |
| GQGTMVTVSSGGGGSGGGGSGGGGSEIVMTQSPATLSVSPGERATLSCRASRSV | | |
| STYLAWYQQKPGQAPRLLIYGASTRATGIPARFSGSGSGTEFTLTISSLQSEDFAVYY | | |
| CQQYDGSPYTFGQGTKLEIK | | |
| EVQLLESGGGLVQPGGSLRLSCAASGFTFDDYAMHWVRQAPGKGLEWVSGISG | 316 | 9375 |
| GGGVTYYADSVKGRFTISRDNSKNTLYLQMNSLRAEDTAVYYCARVYSSGWLDAF | | |
| DIWGQGTMVTVSSGGGGSGGGGSGGGGSDIVMTQSPLSLPVTPGEPASISCRSS | | |
| QSLLHSNGYNYLDWYLQKPGQSPQLLIYDASNLETGVPDRFSGSGSGTDFTLKISR | | |
| VEAEDVGVYYCMQALQTPPAFGPGTKVDIK | | |
| QVQLVQSGAEVKKPGASVKVSCKASGGTFSSYAISWVRQAPGQGLEWMGWISG | 317 | 9376 |
| YNGNTNYAQKFQGRVTMTRDTSTSTVYMELSSLRSEDTAVYYCASSDVSPDAFDI | | |
| WGQGTTVTVSSGGGGSGGGGSGGGGSDIVMTQSPDSLAVSLGERATINCKSSQS | | |
| VLSSSYNKNFLAWYQQKPGQPPKLLIYWASTRESGVPDRFSGSGSGTDFTLTISSL | | |
| QAEDVAVYYCQQYYSAPPTFGQGTKVEIK | | |
| QVQLVQSGAEVKKPGASVKVSCKASGGTQNIYAITWVRQAPGQGLEWVGWVN | 318 | 9377 |
| PNSGNTGYSQKFQGRVTMTRDTSTSTVYMELSSLRSEDTAVYYCATPTSSSDDAF | | |
| DIWGQGTTVTVSSGGGGSGGGGSGGGGSDIVMTQSPDSLAVSLGERATINCKSS | | |
| QSVLSSSYNKNFLAWYQQKPGQPPKLLIYWASTRESGVPDRFSGSGSGTDFTLTIS | | |
| SLQAEDVAVYYCQQYYSDPITFGQGTKLEIK | | |
| QVQLVQSGAEVKKPGSSVKVSCKASGGTFSSYAISWVRQAPGQGLEWMGWINP | 319 | 9378 |
| NSGGTNYAQKFQGRVTITADESTSTAYMELSSLRSEDTAVYYCARASRGDDAFDI | | |
| WGQGTTVTVSSGGGGSGGGGSGGGGSDIVMTQSPDSLAVSLGERATINCKSSQS | | |
| VLSSSYNKNYLAWYQQKPGQPPKLLIYWASARESGVPDRFSGSGSGTDFTLTISSL | | |
| QAEDVAVYYCQQYYSIPIAFGQGTRLEIK | | |
| QVQLVQSGAEVKKPGASVKVSCKASGIPFTSDDINWVRQAPGQGLEWMGIINPS | 320 | 9379 |
| GGSTSYAQKFQGRVTMTRDTSTSTVYMELSSLRSEDTAVYYCARERYEGGYSSGP | | |
| GNYYYGMDVWGQGTTVTVSSGGGGSGGGGSGGGGSDIVMTQSPDSLAVSLGE | | |
| RATINCKSSQSVLSSSYNKNYLAWYQQKPGQPPKLLIYWASTRDSGVPDRFSGSGS | | |
| GTDFTLTISSLQAEDVAVYYCQQYYSIPYTFGQGTKLEIK | | |
| QVQLVQSGAEVKKPGASVKVSCKASGGTFSNYAISWVRQAPGQGLEWMGWM | 321 | 9380 |
| NPNSGNTGYAQKFQGRVTMTRDTSTSTVYMELSSLRSEDTAVYYCARDDDYGDY | | |
| PVWGQGTTVTVSSGGGGSGGGGSGGGGSDIVMTQSPDSLAVSLGERATINCKSS | | |
| QSVLSTSYNKNYLAWYQQKPGQPPKLLIYWASTRASGVPDRFSGSGSGTDFTLTIS | | |
| SLQAEDVAVYYCQQYYTTPPTFGQGTKVEIK | | |
| QVQLVQSGAEVKKPGASVKVSCKASGDTFSDHAINWVRQAPGQGLEWMGWM | 322 | 9381 |
| NPKIGNTGYAQKFQGRVTMTRDTSTSTVYMELSSLRSEDTAVYYCVYDSSGYDAF | | |
| DIWGQGTTVTVSSGGGGSGGGGSGGGGSDIVMTQSPDSLAVSLGERATINCKSS | | |
| QSVLSTSYNRNFLAWYQQKPGQPPKLLIYWASTRQSGVPDRFSGSGSGTDFTLTIS | | |
| SLQAEDVAVYYCQQYYSTPYTFGQGTKLEIK | | |
| QVQLVQSGAEVKKPGASVKVSCKASGYTFTSYDINWVRQAPGQGLEWMGRINP | 323 | 9382 |
| GTGGTDYAHKFQGRVTMTRDTSTSTVYMELSSLRSEDTAVYYCARETPSDYYDSS | | |
| GYYYNDAFDIWGQGTTVTVSSGGGGSGGGGSGGGGSDIVMTQSPDSLAVSLGE | | |
| RATINCKSSQSVLYSSNNKNYLAWYQQKPGQPPKLLIYWASTRESGVPDRFSGSG | | |
| SGTDFTLTISSLQAEDVAVYYCQQYYSTPLTFGGGTKVEIK | | |
| QVQLVQSGAEVKKPGSSVKVSCKASGGTFSSYAISWVRQAPGQGLEWVGIIIPSG | 324 | 9383 |
| GTNYAQTFQGRVTITADESTSTAYMELSSLRSEDTAVYYCARDLGTTFDIWGQGTT | | |
| VTVSSGGGGSGGGGSGGGGSDIQMTQSPSSLSASVGDRVTITCQASQDISNYLN | | |
| WYQQKPGKAPKLLIYAASSLQSGVPSRFSGSGSGTDFTLTISSLQPEDFATYYCQQS | | |
| YSTPTFGQGTKVEIK | | |
| QVQLVQSGAEVKKPGASVKVSCKASGYTFTAYYLHWVRQAPGQGLEWIGWINP | 325 | 9384 |
| DNDNAYYAQKFQGRVTMTRDTSTSTVYMELSSLRSEDTAVYYCAKDIAVAALAYG | | |
| MDVWGQGTTVTVSSGGGGSGGGGSGGGGSDIQMTQSPSSLSASVGDRVTITC | | |
| QASQDISNYLNWYQQKPGKAPKLLIYGASTLQSGVPSRFSGSGSGTDFTLTISSLQP | | |
| EDFATYYCQEADSFPLTFGGGTKVEIK | | |
| EVQLLESGGGLVQPGGSLRLSCAASGFTFSSYAMSWVRQAPGKGLEWVAVISYD | 326 | 9385 |
| GSDQYYADSVKGRFTISRDNSKNTLYLQMNSLRAEDTAVYYCARQSLYYYYGMDV | | |
| WGQGTTVTVSSGGGGSGGGGSGGGGSDIQMTQSPSSLSASVGDRVTITCRASQ | | |
| GIRNDLGWYQQKPGKAPKLLIYDASSLHSGVPSRFSGSGSGTDFTLTISSLQPEDFA | | |
| TYYCQQAYSFPWTFGQGTKLEIK | | |
| QVQLVQSGAEVKKPGSSVKVSCKASGYTFTDYYVHWVRQAPGQGLEWVGWIST | 327 | 9386 |
| FTGNTDYAQNFQGRVTITADESTSTAYMELSSLRSEDTAVYYCARDAPLAAAGTDY | | |
| YYGMDVWGQGTTVTVSSGGGGSGGGGSGGGGSDIQMTQSPSSLSASVGDRVTI | | |
| TCRASQGISNYLAWYQQKPGKAPKLLIYKASSLESGVPSRFSGSGSGTDFTLTISSLQ | | |
| PEDFATYYCQQSYNTPFTFGQGTRLEIK | | |
| EVQLLESGGGLVQPGGSLRLSCAASGFTFSSYAMSWVRQAPGKGLEWVAFISDD | 328 | 9387 |
| GITKYYADSVKGRFTISRDNSKNTLYLQMNSLRAEDTAVYYCARDDSSGYGGMDV | | |
| WGQGTTVTVSSGGGGSGGGGSGGGGSDIQMTQSPSSLSASVGDRVTITCRASQ | | |
| SINRWLAWYQQKPGKAPKLLIYSASNLQSGVPSRFSGSGSGTDFTLTISSLQPEDFA | | |
| TYYCQQSYNTPLTFGGGTKVEIK | | |
| EVQLLESGGGLVQPGGSLRLSCAASGFTFSSYAMHWVRQAPGKGLEWVAVISYD | 329 | 9388 |
| GGDKYYADSVKGRFTISRDNSKNTLYLQMNSLRAEDTAVYYCASGSLVLGYYYMD | | |
| VWGQGTTVTVSSGGGGSGGGGSGGGGSDIQMTQSPSSLSASVGDRVTITCRAS | | |
| QSINTWLAWYQQKPGKAPKLLIYAASSLQSGVPSRFSGSGSGTDFTLTISSLQPEDF | | |
| ATYYCQQANSFPFTFGPGTKVDIK | | |
| QVQLVQSGAEVKKPGASVKVSCKASGYTFTNYYIHWVRQAPGQGLEWMGWIN | 330 | 9389 |
| PNTGGTDYAQKFQGRVTMTRDTSTSTVYMELSSLRSEDTAVYYCATGGGGSYYD | | |
| AFDVWGQGTTVTVSSGGGGSGGGGSGGGGSDIQMTQSPSSLSASVGDRVTITC | | |
| RASQSIRTWLAWYQQKPGKAPKLLIYDASSLETGVPSRFSGSGSGTDFTLTISSLQP | | |
| EDFATYYCQQLNSYPLTFGGGTKVEIK | | |
| QVQLVQSGAEVKKPGASVKVSCKASGGTFSSYAISWVRQAPGQGLEWMGRINP | 331 | 9390 |
| NSGNTGYAQKFQGRVTMTRDTSTSTVYMELSSLRSEDTAVYYCARDIGEGYSMD | | |
| VWGQGTTVTVSSGGGGSGGGGSGGGGSDIQMTQSPSSLSASVGDRVTITCRAS | | |
| QSIRTYLNWYQQKPGKAPKLLIYAASTLQSGVPSRFSGSGSGTDFTLTISSLQPEDF | | |
| ATYYCQQSYSAPLTFGGGTKLEIK | | |
| EVQLLESGGGLVQPGGSLRLSCAASGFTFSNHYTSWVRQAPGKGLEWVAVISYDG | 332 | 9391 |
| SNKYYADSVKGRFTISRDNSKNTLYLQMNSLRAEDTAVYYCAREEKYSSSWYVGV | | |
| DAFDIWGQGTTVTVSSGGGGSGGGGSGGGGSDIQMTQSPSSLSASVGDRVTITC | | |
| RASQSISTYLNWYQQKPGKAPKLLIYAASSLHSGVPSRFSGSGSGTDFTLTISSLQPE | | |
| DFATYYCQQSYSTPLTFGGGTKVEIK | | |
| EVQLLESGGGLVQPGGSLRLSCAASGFTFSSSAMHWVRQAPGKGLEWISSISGSG | 333 | 9392 |
| DNAYYADSVKGRFTISRDNSKNTLYLQMNSLRAEDTAVYYCARDQEDYYYDSSGY | | |
| GMDVWGQGTTVTVSSGGGGSGGGGSGGGGSDIQMTQSPSSLSASVGDRVTITC | | |
| RASQSITTYLNWYQQKPGKAPKLLIYAASTLQSGVPSRFSGSGSGTDFTLTISSLQPE | | |
| DFATYYCQQSYSTPLTFGGGTKVEIK | | |
| QVQLVQSGAEVKKPGSSVKVSCKASGGTFSSHAISWVRQAPGQGLEWMGGIIPIF | 334 | 9393 |
| GTANYAQKFQGRVTITADESTSTAYMELSSLRSEDTAVYYCAKGDWGIVVVPAAI | | |
| GAFDIWGQGTTVTVSSGGGGSGGGGSGGGGSDIVMTQSPLSLPVTPGEPASISC | | |
| RSSQSLLHSNGYNYLDWYLQKPGQSPQLLIYAASSLQSGVPDRFSGSGSGTDFTLKI | | |
| SRVEAEDVGVYYCMQARQTPLTFGQGTRLEIK | | |
| QVQLVQSGAEVKKPGSSVKVSCKASGYTFTAYYMHWVRQAPGQGLEWVGRISP | 335 | 9394 |
| VFGSTTYAQRFQGRVTITADESTSTAYMELSSLRSEDTAVYYCARDLGYYDSSGYRY | | |
| DAFDIWGQGTTVTVSSGGGGSGGGGSGGGGSDIVMTQSPLSLPVTPGEPASISC | | |
| RSSQSLLHSNGYNYLDWYLQKPGQSPQLLIYGASSLQSGVPDRFSGSGSGTDFTLK | | |
| ISRVEAEDVGVYYCMQTLQTPFTFGPGTKVDIK | | |
| QVQLVQSGAEVKKPGSSVKVSCKASGYTFTSYDINWVRQAPGQGLEWMGGISP | 336 | 9395 |
| MFGTANYAQKFQGRVTITADESTSTAYMELSSLRSEDTAVYYCAKDGWYYGMDV | | |
| WGQGTTVTVSSGGGGSGGGGSGGGGSDIVMTQSPLSLPVTPGEPASISCRSSQS | | |
| LLHSNGYNYLDWYLQKPGQSPQLLIYLGSDRASGVPDRFSGSGSGTDFTLKISRVE | | |
| AEDVGVYYCMQALQTPLTFGPGTKVDIK | | |
| QVQLVQSGAEVKKPGSSVKVSCKASGGTFSSYGISWVRQAPGQGLEWMGWINP | 337 | 9396 |
| NSGGTKYAQKFQGRVTITADESTSTAYMELSSLRSEDTAVYYCARGEAGNLDWYF | | |
| DLWGRGTLVTVSSGGGGSGGGGSGGGGSDIVMTQSPDSLAVSLGERATINCKSS | | |
| QTVFSTSYNKNYLAWYQQKPGQPPKLLIYWASTRESGVPDRFSGSGSGTDFTLTIS | | |
| SLQAEDVAVYYCQQYYSTPLTFGGGTKVEIK | | |
| QVQLVQSGAEVKKPGASVKVSCKASGGTFSNYGISWVRQAPGQGLEWMGWIN | 338 | 9397 |
| PNNGDTKYAQKFQGRVTMTRDTSTSTVYMELSSLRSEDTAVYYCAREDVWYFDL | | |
| WGRGTLVTVSSGGGGSGGGGSGGGGSDIVMTQSPDSLAVSLGERATINCKTSQS | | |
| VFSTSYNRDYLAWYQQKPGQPPKLLIYWASTRESGVPDRFSGSGSGTDFTLTISSL | | |
| QAEDVAVYYCQQYYSSPPTFGQGTKVEIK | | |
| QVQLVQSGAEVKKPGASVKVSCKASGYTFTTYGISWVRQAPGQGLEWMGWIST | 339 | 9398 |
| YDGKTNYAQKLQGRVTMTRDTSTSTVYMELSSLRSEDTAVYYCALHLGGDWYFD | | |
| LWGRGTLVTVSSGGGGSGGGGSGGGGSDIQMTQSPSSLSASVGDRVTITCRASQ | | |
| SISSWLAWYQQKPGKAPKLLIYDASTLQSGVPSRFSGSGSGTDFTLTISSLQPEDFA | | |
| TYYCQQSYSTPFTFGPGTKVDIK | | |
| QVQLVQSGAEVKKPGASVKVSCKASGYTFTGYYMHWVRQAPGQGLEWMGWI | 340 | 9399 |
| NPNTGATYYAQKFQGRVTMTRDTSTSTVYMELSSLRSEDTAVYYCARQHGDYD | | |
| WYFDLWGRGTLVTVSSGGGGSGGGGSGGGGSDIQMTQSPSSLSASVGDRVTIT | | |
| CRASQSISSYLNWYQQKPGKAPKLLIYDASNLKTGVPSRFSGSGSGTDFTLTISSLQP | | |
| EDFATYYCQQSYSFPTFGGGTKVEIK | | |
| QVQLVQSGAEVKKPGASVKVSCKASGDTFTTYYVHWVRQAPGQGLEWMGWIN | 341 | 9400 |
| PNSGNTGYAQKFQGRVTMTRDTSTSTVYMELSSLRSEDTAVYYCARDSGRHWG | | |
| QGTLVTVSSGGGGSGGGGSGGGGSEIVMTQSPATLSVSPGERATLSCRASQSVSS | | |
| YLAWYQQKPGQAPRLLIYDTSSRATGIPARFSGSGSGTEFTLTISSLQSEDFAVYYC | | |
| QQYYDTPYTFGQGTKLEIKR* | | |
| QVQLVQSGAEVKKPGSSVKVSCKASGGTFSSYGISWVRQAPGQGLEWMGRIIPM | 342 | 9401 |
| LGIANYAQKFQGRVTITADESTSTAYMELSSLRSEDTAVYYCVREEVAGANWFDP | | |
| WGQGTLVTVSSGGGGSGGGGSGGGGSDIVMTQSPDSLAVSLGERATINCKSSQS | | |
| VLYSSNNKNYLAWYQQKPGQPPKLLIYLASTREPGVPDRFSGSGSGTDFTLTISSLQ | | |
| AEDVAVYYCQQYYSTPPTFGGGTKLEIKR* | | |
| QVQLVQSGAEVKKPGASVKVSCKASGYTFTSYAMNWVRQAPGQGLEWMGIINP | 343 | 9402 |
| SGGSTSYARKFQGRVTMTRDTSTSTVYMELSSLRSEDTAVYYCAREGDYGSGEFD | | |
| YWGQGTLVTVSSGGGGSGGGGSGGGGSDIVMTQSPDSLAVSLGERATINCKSSQ | | |
| SVLSSSYNKNYVAWYQQKPGQPPKLLIYWASTRESGVPDRFSGSGSGTDFTLTISSL | | |
| QAEDVAVYYCQQYYSTPLTFGGGTKVEIKR* | | |
| QVQLVQSGAEVKKPGASVKVSCKASGYTFTSSYMHWVRQAPGQGLEWMGWM | 344 | 9403 |
| NPRSGNTGYAQKFQGRVTMTRDTSTSTVYMELSSLRSEDTAVYYCARERDDYGD | | |
| YGWLDYWGQGTLVTVSSGGGGSGGGGSGGGGSDIQMTQSPSSLSASVGDRVTI | | |
| TCQASQDISNYLNWYQQKPGKAPKLLIYAAASLQSGVPSRFSGSGSGTDFTLTISSL | | |
| QPEDFATYYCQQTYSTPWTFGQGTRLEIKR* | | |
| QVQLVQSGAEVKKPGASVKVSCKASGYTFTGYYMHWVRQAPGQGLEWMGIIN | 345 | 9404 |
| PSGGSTSYAQKFQGRVTMTRDTSTSTVYMELSSLRSEDTAVYYCARDLYDSSGYW | | |
| HYYYYMDVWGKGTTVTVSSGGGGSGGGGSGGGGSDIQMTQSPSSLSASVGDR | | |
| VTITCRASQDINTYLAWYQQKPGKAPKLLIYAASSLQSGVPSRFSGSGSGTDFTLTIS | | |
| SLQPEDFATYYCQQSSSFPLTFGQGTKVEIKR* | | |
| QVQLVQSGAEVKKPGSSVKVSCKASGGTFSSYAFSWVRQAPGQGLEWMGWINP | 346 | 9405 |
| NSGGTNYAQKFQGRVTITADESTSTAYMELSSLRSEDTAVYYCARFSGYDYVDYW | | |
| GQGTLVTVSSGGGGSGGGGSGGGGSDIQMTQSPSSLSASVGDRVTITCQASQDI | | |
| SNYLNWYQQKPGKAPKLLIYAASSLQSGVPSRFSGSGSGTDFTLTISSLQPEDFATY | | |
| YCQQLYNFPYTFGGGTKVEIKR* | | |
| QVQLVQSGAEVKKPGASVKVSCKASGGTFSSYAISWVRQAPGQGLEWMGIINPN | 347 | 9406 |
| GGNTSYAQKFQGRVTMTRDTSTSTVYMELSSLRSEDTAVYYCARDVGEDFDLWG | | |
| QGTMVTVSSGGGGSGGGGSGGGGSDIQMTQSPSSLSASVGDRVTITCRASQSIS | | |
| RYLAWYQQKPGKAPKLLIYGASTRESGVPSRFSGSGSGTDFTLTISSLQPEDFATYY | | |
| CQQSYNTPLTFGQGTKLEIKR | | |
| QVQLVQSGAEVKKPGSSVKVSCKASGYTFTSYYIHWVRQAPGQGLEWLGVINPA | 348 | 9407 |
| DGDTTYAQMFQGRVTITADESTSTAYMELSSLRSEDTAVYYCARDFDWLFAMDV | | |
| WGKGTTVTVSSGGGGSGGGGSGGGGSDIQMTQSPSSLSASVGDRVTITCRASQT | | |
| LSGWLAWYQQKPGKAPKLLIYGASTLQGGVPSRFSGSGSGTDFTLTISSLQPEDFA | | |
| TYYCQQYYSYPPTFGQGTKVEIKR* | | |
| QVQLVQSGAEVKKPGASVKVSCKASGGTFSNYALNWVRQAPGQGLEWMGRIN | 349 | 9408 |
| PNGGTTYYAKNFQGRVTMTRDTSTSTVYMELSSLRSEDTAVYYCAKHGDHGFYV | | |
| WGLWTKGTVSSGGGGSGGGGSGGGGSDIQMTQSPSSLSASVGDRVTITCFASQ | | |
| DIINYLNWYQQKPGKAPKLLIYEASNLETGVPSRFSGSGSGTDFTLTISSLQPEDFAT | | |
| YYCQQSYSTPLTFGQGTKVEIKR | | |
| QVQLVQSGAEVKKPGASVKVSCKASGGTFSSYAISWVRQAPGQGLEWMGMINP | 350 | 9409 |
| NVGSATYAQRFQGRVTMTRDTSTSTVYMELSSLRSEDTAVYYCAREDSGTSWFD | | |
| PWGQGTLVTVSSGGGGSGGGGSGGGGSDIQMTQSPSSLSASVGDRVTITCRAS | | |
| QSISSYLNWYQQKPGKAPKLLIYDVFNLGTGVPSRFSGSGSGTDFTLTISSLQPEDF | | |
| ATYYCQQSYSSPFTFGQGTRLEIKR* | | |
| QVQLVQSGAEVKKPGASVKVSCKASGYTFTSYYMHWVRQAPGQGLEWMGIINP | 351 | 9410 |
| SDGSTSYAQRFQGRVTMTRDTSTSTVYMELSSLRSEDTAVYYCARDDRGSNYYYG | | |
| MDVWGQGTTVTVSSGGGGSGGGGSGGGGSDIQMTQSPSSLSASVGDRVTITC | | |
| QASQDISNYLNWYQQKPGKAPKLLIYMASNLESGVPSRFSGSGSGTDFTLTISSLQ | | |
| PEDFATYYCQQTNSFPLTFGQGTKLEIKR* | | |
| QVQLVQSGAEVKKPGASVKVSCKASGYTFTAYYVHWVRQAPGQGLEWMGWM | 352 | 9411 |
| NPNSGTTGYAQKFQGRVTMTRDTSTSTVYMELSSLRSEDTAVYYCARDSSDYYGD | | |
| YRADAFDIWGQGTMVTVSSGGGGSGGGGSGGGGSDIQMTQSPSSLSASVGDR | | |
| VTITCRASQSISSYLNWYQQKPGKAPKLLIYDASNLETGVPSRFSGSGSGTDFTLTIS | | |
| SLQPEDFATYYCQQSYSTPLTFGGGTKVEIKR* | | |
| QVQLVQSGAEVKKPGSSVKVSCKASGYTFTSYDINWVRQAPGQGLEWMGVISPS | 353 | 9412 |
| GDATLYAQSFQGRVTITADESTSTAYMELSSLRSEDTAVYYCVKGLDHWGQGTLV | | |
| TVSSGGGGSGGGGSGGGGSDIVMTQSPLSLPVTPGEPASISCRSSQSLLHSNGYN | | |
| YLDWYLQKPGQSPQLLIYLGSNRASGVPDRFSGSGSGTDFTLKISRVEAEDVGVYY | | |
| CMQALQSPWTFGQGTKLEIKR* | | |
| EVQLLESGGGLVQPGGSLRLSCAASGFSFSDYGMHWVRQAPGKGLEWVSAIGGI | 354 | 9413 |
| GDSTYYADSVKGRFTISRDNSKNTLYLQMNSLRAEDTAVYYCARMNYGDSNYYYY | | |
| YGMDVWGQGTTVTVSSGGGGSGGGGSGGGGSDIVMTQSPDSLAVSLGERATI | | |
| NCKSSQSVLYSSNNKNYLAWYQQKPGQPPKLLIYWASTRESGVPDRFSGSGSGTD | | |
| FTLTISSLQAEDVAVYYCQQYYSSPLTFGGGTKVEIKR* | | |
| QVQLVQSGAEVKKPGASVKVSCKASGYTFTSYDISWVRQAPGQGLEWMGMISP | 355 | 9414 |
| SDGSTTYAPKFQGRVTMTRDTSTSTVYMELSSLRSEDTAVYYCARGAVGFDYWG | | |
| QGTLVTVSSGGGGSGGGGSGGGGSDIVMTQSPLSLPVTPGEPASISCRSSQSLLHS | | |
| NGYNYLDWYLQKPGQSPQLLIYLGSNRASGVPDRFSGSGSGTDFTLKISRVEAEDV | | |
| GVYYCMQALQTPPSFGQGTKVEIKR* | | |
| QVQLVQSGAEVKKPGSSVKVSCKASGYTFTSYGISWVRQAPGQGLEWMGWINT | 356 | 9415 |
| YSGYTDYAHKFQGRVTITADESTSTAYMELSSLRSEDTAVYYCTTDDFLSFGYWGQ | | |
| GTLVTVSSGGGGSGGGGSGGGGSDIQMTQSPSSLSASVGDRVTITCRASESVSTW | | |
| LAWYQQKPGKAPKLLIYKASRLESGVPSRFSGSGSGTDFTLTISSLQPEDFATYYCQ | | |
| QSYKTPYTFGQGTKLEIKR* | | |
| QVQLVQSGAEVKKPGSSVKVSCKASGYMFTDYYIHWVRQAPGQGLEWMGGIIP | 357 | 9416 |
| YFGTANYAQKFQGRVTITADESTSTAYMELSSLRSEDTAVYYCARSISGSYVLDAFD | | |
| IWGQGTTVTVSSGGGGSGGGGSGGGGSDIVMTQSPDSLAVSLGERATINCKSSQ | | |
| SVLYSSNNKNYLAWYQQKPGQPPKLLIYWASTRESGVPDRFSGSGSGTDFTLTISS | | |
| LQAEDVAVYYCQQYFTTPLTFGQGTKLEIKR* | | |
| QVQLVQSGAEVKKPGSSVKVSCKASGYTFNSYGISWVRQAPGQGLEWMGGIIPIF | 358 | 9417 |
| GTANYAQKFQGRVTITADESTSTAYMELSSLRSEDTAVYYCARDWGYGDYADDA | | |
| FDIWGQGTMVTVSSGGGGSGGGGSGGGGSDIQMTQSPSSLSASVGDRVTITCR | | |
| ASQSISSYLNWYQQKPGKAPKLLIYAASSLQSGVPSRFSGSGSGTDFTLTISSLQPED | | |
| FATYYCQQSYSTPYTFGQGTKVEIKR* | | |
| QVQLVQSGAEVKKPGSSVKVSCKASGGTFSNNDINWVRQAPGQGLEWMGWIN | 359 | 9418 |
| PIYGSANYAQNFQGRVTITADESTSTAYMELSSLRSEDTAVYYCAADWRGFDYWG | | |
| QGTLVTVSSGGGGSGGGGSGGGGSDIVMTQSPDSLAVSLGERATINCKSSQSVLS | | |
| SSYNKNYLAWYQQKPGQPPKLLIYWASTRASGVPDRFSGSGSGTDFTLTISSLQAE | | |
| DVAVYYCQQYYDTPLTFGQGTKVEIKR* | | |
| QVQLVQSGAEVKKPGASVKVSCKASGYTFTEYAIHWVRQAPGQGLEWMGRMN | 360 | 9419 |
| PHNGDTGYAQKFQGRVTMTRDTSTSTVYMELSSLRSEDTAVYYCAREGDYLGYPI | | |
| DCWGRGTLVTVSSGGGGSGGGGSGGGGSDIQMTQSPSSLSASVGDRVTITCRAS | | |
| QSISSYLNWYQQKPGKAPKLLIYKASTLESGVPSRFSGSGSGTDFTLTISSLQPEDFA | | |
| TYYCQQNDSIPITFGQGTRLEIKR* | | |
| EVQLLESGGGLVQPGGSLRLSCAASGFTFSDYSMSWVRQAPGKGLEWVAAIWQ | 361 | 9420 |
| DGNVKFYADSVKGRFTISRDNSKNTLYLQMNSLRAEDTAVYYCARDGNSGYVFW | | |
| GQGTLVTVSSGGGGSGGGGSGGGGSDIQMTQSPSSLSASVGDRVTITCRASQSIS | | |
| RWLAWYQQKPGKAPKLLIYDASNLETGVPSRFSGSGSGTDFTLTISSLQPEDFATY | | |
| YCLQDYSYPLTFGQGTKVEIKR* | | |
| QVQLVQSGAEVKKPGASVKVSCKASGYTFTTYYMHWVRQAPGQGLEWMGWIN | 362 | 9421 |
| PNTGDTAYAQKIQGRVTMTRDTSTSTVYMELSSLRSEDTAVYYCARTAEAVAGLP | | |
| AFDYWGQGTLVTVSSGGGGSGGGGSGGGGSDIVMTQSPDSLAVSLGERATINCK | | |
| TSQSVFSTSYNRDYLAWYQQKPGQPPKLLIYWASTRAAGVPDRFSGSGSGTDFTL | | |
| TISSLQAEDVAVYYCQQYYYTSTFGQGTKVEIKR* | | |
| QVQLVQSGAEVKKPGSSVKVSCKASGGTSNNYAIDWVRQAPGQGLEWMGGIIP | 363 | 9422 |
| LFGTTTYAQKFQGRVTITADESTSTAYMELSSLRSEDTAVYYCARVTLYGDYDYWG | | |
| QGTLVTVSSGGGGSGGGGSGGGGSDIQMTQSPSSLSASVGDRVTITCRASQSINR | | |
| YLNWYQQKPGKAPKLLIYAASSLQSGVPSRFSGSGSGTDFTLTISSLQPEDFATYYC | | |
| QQANSFPPTFGGGTKVEIKR* | | |
| QVQLVQSGAEVKKPGASVKVSCKASGYSLITHWMHWVRQAPGQGLEWMGMI | 364 | 9423 |
| NPSDGVTYYAQTFQGRVTMTRDTSTSTVYMELSSLRSEDTAVYYCAREYYGEGFD | | |
| YWGQGTLVTVSSGGGGSGGGGSGGGGSDIQMTQSPSSLSASVGDRVTITCRAS | | |
| QGISNYLAWYQQKPGKAPKLLIYSASNLQSGVPSRFSGSGSGTDFTLTISSLQPEDF | | |
| ATYYCQQSYSTPLTFGGGTKVEIKR* | | |
| QVQLVQSGAEVKKPGASVKVSCKASGGTFSSYAISWVRQAPGQGLEWMGIINPS | 365 | 9424 |
| GGSTSNAQKFQGRVTMTRDTSTSTVYMELSSLRSEDTAVYYCARDLGDTAMDG | | |
| WGQGTLVTVSSGGGGSGGGGSGGGGSDIQMTQSPSSLSASVGDRVTITCRASQS | | |
| IDSYLNWYQQKPGKAPKLLIYKASTLESGVPSRFSGSGSGTDFTLTISSLQPEDFATY | | |
| YCQQSYSAPLTFGGGTKVEIKR* | | |
| QVQLVQSGAEVKKPGASVKVSCKASGYTFTSYYLHWVRQAPGQGLEWMGIITPS | 366 | 9425 |
| GGSTTYAHKFQGRVTMTRDTSTSTVYMELSSLRSEDTAVYYCARDGGLASFDYW | | |
| GQGTLVTVSSGGGGSGGGGSGGGGSDIQMTQSPSSLSASVGDRVTITCRASQDIS | | |
| TWLAWYQQKPGKAPKLLIYDASNLETGVPSRFSGSGSGTDFTLTISSLQPEDFATYY | | |
| CQQVNSDPYTFGQGTRLEIKR* | | |
| QVQLVQSGAEVKKPGASVKVSCKASGGTFSSYAISWVRQAPGQGLEWMGWMN | 367 | 9426 |
| PNSGNTGYAQKFQGRVTMTRDTSTSTVYMELSSLRSEDTAVYYCARGGGWAMT | | |
| DAFDIWGQGTMVTVSSGGGGSGGGGSGGGGSDIQMTQSPSSLSASVGDRVTIT | | |
| CQASQDISNYLNWYQQKPGKAPKLLIYAASTLESGVPSRFSGSGSGTDFTLTISSLQ | | |
| PEDFATYYCQQGDSLPLTFGGGTKVEIKR* | | |
| EVQLVESGGGLVKPGGSLRLSCAASGFTFDDYGMSWVRQAPGKGLEWVSLIYSG | 368 | 9427 |
| GDTYYADSVKGRFTISRDDSKNTLYLQMNSLKTEDTAVYYCTRKEYYYDSSGYLRLF | | |
| DYWGQGTLVTVSSGGGGSGGGGSGGGGSDIQMTQSPSSLSASVGDRVTITCRAS | | |
| QGISNYLAWYQQKPGKAPKLLIYAASSLQSGVPSRFSGSGSGTDFTLTISSLQPEDF | | |
| ATYYCQQSDSFPYTFGQGTKVEIKR* | | |
| QVQLVQSGAEVKKPGSSVKVSCKASGYTFTDYYMHWVRQAPGQGLEWMGGIN | 369 | 9428 |
| PIFGTSNYAQKFQGRVTITADESTSTAYMELSSLRSEDTAVYYCARDISGYDYYYYG | | |
| MDVWGQGTTVTVSSGGGGSGGGGSGGGGSEIVMTQSPATLSVSPGERATLSCR | | |
| ASQSVSTYLAWYQQKPGQAPRLLIYGASTRATGIPARFSGSGSGTEFTLTISSLQSE | | |
| DFAVYYCQQHDSYPLTFGGGTKVEIKR* | | |
| QVQLVQSGAEVKKPGASVKVSCKASGGTLNNYAFSWVRQAPGQGLEWMGMID | 370 | 9429 |
| PSDGTIAYAQKFQGRVTMTRDTSTSTVYMELSSLRSEDTAVYYCARSDYDFWSGL | | |
| GGYFDYWGQGTLVTVSSGGGGSGGGGSGGGGSDIQMTQSPSSLSASVGDRVTI | | |
| TCRASQGIRNDLGWYQQKPGKAPKLLIYAASSLQSGVPSRFSGSGSGTDFTLTISSL | | |
| QPEDFATYYCQQANSFPPTFGQGTRLEIKR* | | |
| QVQLVQSGAEVKKPGASVKVSCKASGGTFSSYAISWVRQAPGQGLEWMGTIDP | 371 | 9430 |
| NSGGTMFAQKFQGRVTMTRDTSTSTVYMELSSLRSEDTAVYYCARDSAEWELGG | | |
| SFDYWGQGTLVTVSSGGGGSGGGGSGGGGSDIQMTQSPSSLSASVGDRVTITCR | | |
| ASESISTYLNWYQQKPGKAPKLLIYKASNLESGVPSRFSGSGSGTDFTLTISSLQPED | | |
| FATYYCQQTDSTFITFGQGTKVEIKR* | | |
| EVQLLESGGGLVQPGGSLRLSCAASGFTFSNHYTSWVRQAPGKGLEWVSSIGVN | 372 | 9431 |
| GDTYYLDSVKGRFTISRDNSKNTLYLQMNSLRAEDTAVYYCAREGLVFSGRGHWY | | |
| FDLWGRGTLVTVSSGGGGSGGGGSGGGGSDIQMTQSPSSLSASVGDRVTITCRA | | |
| SRNIHDYLNWYQQKPGKAPKLLIYAASTLQTGVPSRFSGSGSGTDFTLTISSLQPED | | |
| FATYYCQQTYSTPPTFGPGTKVDIKR* | | |
| QVQLVQSGAEVKKPGASVKVSCKASGGTFSNYAISWVRQAPGQGLEWMGRINP | 373 | 9432 |
| NGGNTSNAQKFQGRVTMTRDTSTSTVYMELSSLRSEDTAVYYCARDYEDADFDG | | |
| WGQGTLVTVSSGGGGSGGGGSGGGGSDIQMTQSPSSLSASVGDRVTITCRASQS | | |
| NDSYLNWYQQKPGKAPKLLIYKASTLESGVPSRFSGSGSGTDFTLTISSLQPEDFAT | | |
| YYCQQSYSSPLTFGQGTKVEIKR | | |
| QVQLVQSGAEVKKPGASVKVSCKASGYTFSDHHVHWVRQAPGQGLEWMGW | 374 | 9433 |
| MNPDSGNTGYAQRFQGRVTMTRDTSTSTVYMELSSLRSEDTAVYYCARDSTSGV | | |
| DYWGQGTLVTVSSGGGGSGGGGSGGGGSDIQMTQSPSSLSASVGDRVTITCRAS | | |
| QSISDFLNWYQQKPGKAPKLLIYAASTLQSGVPSRFSGSGSGTDFTLTISSLQPEDF | | |
| ATYYCQQSYSSPYTFGQGTKVEIKR* | | |
| EVQLLESGGGLVQPGGSLRLSCAASGFTFSSYAMSWVRQAPGKGLEWVAVISYD | 375 | 9434 |
| GHDQFYADSVKGRFTISRDNSKNTLYLQMNSLRAEDTAVYYCARGEQQLEGFYYY | | |
| YGMDVWGQGTTVTVSSGGGGSGGGGSGGGGSDIQMTQSPSSLSASVGDRVTIT | | |
| CQASQDISNYLNWYQQKPGKAPKLLIYAASSLQSGVPSRFSGSGSGTDFTLTISSLQ | | |
| PEDFATYYCQQANRFPLTFGQGTKLEIKR* | | |
| EVQLLESGGGLVQPGGSLRLSCAASGFTFSSYWMHWVRQAPGKGLEWVAVISYD | 376 | 9435 |
| GSKEYYADSVKGRFTISRDNSKNTLYLQMNSLRAEDTAVYYCASDYGDYGTYDYW | | |
| GQGTLVTVSSGGGGSGGGGSGGGGSDIQMTQSPSSLSASVGDRVTITCQASQDI | | |
| SNYLNWYQQKPGKAPKLLIYKASNLQSGVPSRFSGSGSGTDFTLTISSLQPEDFATY | | |
| YCQQSYNFPATFGQGTRLEIKR* | | |
| EVQLLESGGGLVQPGGSLRLSCAASGFTFSSYWMHWVRQAPGKGLEWVSGISG | 377 | 9436 |
| GGDDTYYADSVKGRFTISRDNSKNTLYLQMNSLRAEDTAVYYCAREPLAYCGGDC | | |
| PGGFDYWGQGTLVTVSSGGGGSGGGGSGGGGSDIVMTQSPLSLPVTPGEPASIS | | |
| CRSSQSLLHSNGYNYLDWYLQKPGQSPQLLIYLGSNRASGVPDRFSGSGSGTDFTL | | |
| KISRVEAEDVGVYYCMQGTHWPETFGQGTKVEIKR* | | |
| EVQLLESGGGLVQPGGSLRLSCAASGFTFSDHYMDWVRQAPGKGLEWVSAIGTG | 378 | 9437 |
| GDTYYADSVKGRFTISRDNSKNTLYLQMNSLRAEDTAVYYCARHEDTAIFLDYWG | | |
| QGTLVTVSSGGGGSGGGGSGGGGSDIQMTQSPSSLSASVGDRVTITCRASQSISS | | |
| YLNWYQQKPGKAPKLLIYDASNLETGVPSRFSGSGSGTDFTLTISSLQPEDFATYYC | | |
| QQSYSTPLTFGQGTKLEIKR* | | |
| QVQLVQSGAEVKKPGASVKVSCKASGYTFTSYYMHWVRQAPGQGLEWMGMIS | 379 | 9438 |
| PSDGSTTYAPKFQGRVTMTRDTSTSTVYMELSSLRSEDTAVYYCARDGYDAWSYG | | |
| MDVWGQGTMVTVSSGGGGSGGGGSGGGGSDIQMTQSPSSLSASVGDRVTITC | | |
| RASQGISDYLAWYQQKPGKAPKLLIYDASNLETGVPSRFSGSGSGTDFTLTISSLQP | | |
| EDFATYYCQQSYILPLTFGGGTKVEIKR* | | |
| QVQLVQSGAEVKKPGSSVKVSCKASGYTFTGYYMHWVRQAPGQGLEWMGWM | 380 | 9439 |
| NPNSGNTGYAQKFQGRVTITADESTSTAYMELSSLRSEDTAVYYCARDGVTGTDY | | |
| WGQGTLVTVSSGGGGSGGGGSGGGGSDIQMTQSPSSLSASVGDRVTITCRASQ | | |
| DINDFLAWYQQKPGKAPKLLIYAASSLQSGVPSRFSGSGSGTDFTLTISSLQPEDFA | | |
| TYYCQQSYSAPYTFGQGTKLEIKR* | | |
| EVQLLESGGGLVQPGGSLRLSCAASGFAFSSYVLHWVRQAPGKGLEWVSAISGAG | 381 | 9440 |
| DSTYYADSVKGRFTISRDNSKNTLYLQMNSLRAEDTAVYYCAREPTTVTDDWYFD | | |
| LWGRGTLVTVSSGGGGSGGGGSGGGGSDIQMTQSPSSLSASVGDRVTITCRASQ | | |
| SISNWLAWYQQKPGKAPKLLIYAASKLESGVPSRFSGSGSGTDFTLTISSLQPEDFA | | |
| TYYCQQSYSSPWTFGQGTRLEIKR* | | |
| EVQLVESGGGLVKPGGSLRLSCAASGFAFSSHWMHWVRQAPGKGLEWVSAISG | 382 | 9441 |
| NGDNSYYADSVKGRFTISRDDSKNTLYLQMNSLKTEDTAVYYCARDRAPEYFDLW | | |
| GRGTLVTVSSGGGGSGGGGSGGGGSDIQMTQSPSSLSASVGDRVTITCRASQGID | | |
| SWLAWYQQKPGKAPKLLIYAASTLESGVPSRFSGSGSGTDFTLTISSLQPEDFATYY | | |
| CQQAYSFPLTFGGGTKVEIKR* | | |
| QVQLVQSGAEVKKPGASVKVSCKASGGTFSSYAISWVRQAPGQGLEWMGWINP | 383 | 9442 |
| NSGGTNYAQKFQGRVTMTRDTSTSTVYMELSSLRSEDTAVYYCARDDYGDYGGG | | |
| MDVWGQGTTVTVSSGGGGSGGGGSGGGGSDIQMTQSPSSLSASVGDRVTITCR | | |
| ASQNIGTWLAWYQQKPGKAPKLLIYRASSLESGVPSRFSGSGSGTDFTLTISSLQPE | | |
| DFATYYCQQAYSFPWTFGQGTKLEIKR* | | |
| QVQLVQSGAEVKKPGASVKVSCKASGYTFTDYYMHWVRQAPGQGLEWMGW | 384 | 9443 |
| MNPNSGHTGYAEKFQGRVTMTRDTSTSTVYMELSSLRSEDTAVYYCAKDTSPRY | | |
| GDGFFDYWGQGTLVTVSSGGGGSGGGGSGGGGSDIQMTQSPSSLSASVGDRVT | | |
| ITCRASQNINNWLAWYQQKPGKAPKLLIYKASTLQSGVPSRFSGSGSGTDFTLTISS | | |
| LQPEDFATYYCQQADSFPPTFGQGTKVEIKR* | | |
| EVQLLESGGGLVQPGGSLRLSCAASGFTFSSYWMHWVRQAPGKGLEWVAVTSY | 385 | 9444 |
| DGSNKYYADSVKGRFTISRDNSKNTLYLQMNSLRAEDTAVYYCARESGFSAEYFQH | | |
| WGQGTLVTVSSGGGGSGGGGSGGGGSDIQMTQSPSSLSASVGDRVTITCRASQ | | |
| DISSYLAWYQQKPGKAPKLLIYAASTLQSGVPSRFSGSGSGTDFTLTISSLQPEDFAT | | |
| YYCQQLNRYPITFGQGTKVEIKR* | | |
| QVQLVQSGAEVKKPGASVKVSCKASGGTFSSYAISWVRQAPGQGLEWMGIINPS | 386 | 9445 |
| GGSTSYAQKFQGRVTMTRDTSTSTVYMELSSLRSEDTAVYYCARATGLYCSGSCFD | | |
| YWGQGTLVTVSSGGGGSGGGGSGGGGSDIQMTQSPSSLSASVGDRVTITCRAS | | |
| QDISNYLAWYQQKPGKAPKLLIYAASILHSGVPSRFSGSGSGTDFTLTISSLQPEDFA | | |
| TYYCQQYDSSFITFGQGTRLEIKR* | | |

TABLE 20
VH Sequences
Table 20-VH sequences

| | Binder | SEQ ID |
|---|---|---|
| Sequence | Name | NO: |
| QVQLQQSGAELMKPGASVKISCKATGYTFSSYWIEWVKQRPGHGLEWIGEIFPGS | 1 | 257 |
| GHTSFNEKFKGKATFTADTSSNTAYIQLSSLTSEDSAVYYCARRGYGYDEGFDYWG | | |
| QGTTLTVSS | | |
| QVQLQQSGAELMKPGASVKISCKATGYTLSSYWIEWVKQRPGHGLEWIGEILPGS | 2 | 258 |
| GSTSYNEKFKGKATFTADTSSSTAYMQLSSLTSEDSAVYYCARRGYGYDEGFDYWG | | |
| QGTTLTVSS | | |
| LVKTGASVKISCKASGYSFTGYYMHWVKQSHGKSLEWIGYISSYNGATSYNQKFKG | 3 | 259 |
| KATFTVDTSSSTAYMQFNSLTSEDSAVYYCARGRYGEYFDYWGQGTTLTVSS | | |
| LVKTGASVKISCKASGYSFTGYYMHWVKQSHGKSLEWIGYISSYNGVTGYNQKFK | 4 | 260 |
| GKATFTVDTSSSTAYMQFNSLTSEDSAVYYCARGRYGDYFDYWGQGTTLTVSS | | |
| LVKTGASVKISCKASGYSFTGYYMHWVKQSHGKSLEWIGYISSYNGVTSYNQKFKG | 5 | 261 |
| KATFTVDTSSSTAYMHFNSLTSEDSAVYYCARGRYGDYFDYWGQGTTLTVSS | | |
| LVKTGASVKISCKASGYSFTGYYMHWVKQSHGKSLEWIGYISSYNGVTGYNQKFK | 6 | 262 |
| GKATFTVDTSSSTAYMQFNSLTSEDSAVYYCARGRYGDYFDYWGQGTTLTVSS | | |
| LVKTGASVKISCKASGYSFTGYYMHWVKQSHGKSLEWIGYISSYNGANGYNQKFK | 7 | 263 |
| GKATFTVDTSSSTAYMQFNSLTSEDSAVYYCARGRYGDYFDYWGQGTTLTVSS | | |
| LVKTGASVKISCKASGYSFTGYYMHWVKQSHGKSLEWIGYISSYNGVTGYNQKFK | 8 | 264 |
| GKATFTVDTSSSTAYMQFNSLTSEDSAVYYCARGRYGDYFDYWGQGTTLTVSS | | |
| LVKTGASVKISCKASGYSFTGYYMHWVKQSHGKSLEWIGYISSYNGVTGYNQKFK | 9 | 265 |
| GKATFTVDTSSSTAYMQFNSLTSEDSAVYYCARGRYGDYFDYWGQGTTLTVSS | | |
| LVKTGASVKISCKASGYSFTGYYMHWVKQSHGKSLEWIGYISSYNGVTGYNQKFK | 10 | 266 |
| GKATFTVDTSSSTAYMQFNSLTSEDSAVYYCARGRYGDYFDYWGQGTTLTVSS | | |
| LVKTGASVKISCKASGYSFTGYYMHWVKQSHGKSLEWIGYISSYNGVTGYNQKFK | 11 | 267 |
| GKATFTVDTSSSTAYMQFNSLTSEDSAVYYCARGRYGDYFDYWGQGTTLAVSS | | |
| LVKTGASVKISCKASGYSFTGFYMHWVKQSHGKGLEWIGYISSYNGATGYNQKFK | 12 | 268 |
| GKATFTVDTSSSTAYMQFNSLTSEDSAVYYCARGRYGDYFDYWGQGTTLTVSS | | |
| LVKTGASVKISCKASGYSFTGYYMHWVKQSHGKSLEWIGYISSYNGATGYNQKFK | 13 | 26 |
| GKATFTVDTSSSTAYMQFNSLTSEDSAVYYCARGRYGDYFDYWGQGTTLTVSS | | |
| QVQLQQPGAELVKPGASVKLSCKASGYTFTSYWMHWVKQRPGQGLEWIGMIHP | 14 | 270 |
| NSGTTNYNEKFKSKATLTVDKSSSTAYMQLSSLTSEDSAVYYCARWGDGYSFAYW | | |
| GQGTLVTVSA | | |
| QVQLKQSGPELVKPGASVKMSCKASGYTFTDYVINWVKQRTGQGLEWIGEIYPGS | 15 | 271 |
| GSSYYNEKFKGKATLTADKSSNTAYMQLSSLTSEDSAVYFCARRGERGPWFAYWG | | |
| QGTLVTVSA | | |
| QVQLQQPGAELIKPGASVKLSCKASGYTFTSYWMHWVKQRPGQGLEWIGMIHP | 16 | 272 |
| NSGSTNYNEKFKSKATLTVDKSSSTAYMQLSSLTSEDSAVYYCARPGGYGFVYWG | | |
| QGTLVTVSA | | |
| EVQLQQSGAELVKPGASVKLSCTPSGFNIKDTSLHWVKQGPEQGLEWIGRIDPAN | 17 | 273 |
| GNTKYDPKFQGKATITADTSSNTAYLQLSSLTSEDTAVYYCARGPDDGYFYYYSMD | | |
| YWGQGTSVTVSS | | |
| QVQLQQSGPELKKPGETVKISCKASGYTFTNYGMNWVKQAPGKGLKWMGWIN | 18 | 274 |
| TYTGEPTYADDFKGRFAFSLETSASTAYLQINNLKNEDMATYFCARKYYDYEFAYW | | |
| GQGTLVTVSA | | |
| QVQLQESGGGLVKPGGSLKLSCAASGFTFSSYAMSWVRQTPEKRLEWVATISSGG | 19 | 275 |
| SYTYYPDSVKGRFTISRDNAKNTLYLQMSSLRSEDTAMYYCARHEEANWAWFAY | | |
| WGQGTLVTVSA | | |
| QVQLKQSGPGLVQPSQSLSITCTVSGFSLTSYGVHWVRQSPGKGLEWLGVIWSG | 20 | 276 |
| GSTDYNAAFISRLSISKDNSKSQVFFKMNSLQANDTAIYYCASYYGSSRSYWYLDV | | |
| WGAGTTVTVSS | | |
| QVKLVESGGDLVKPGGSLKLSCATSGFTFSSYGMSWVRQTPDKRLEWVATISSGG | 21 | 277 |
| SYTYYPDSVKGRFTISRDNAKNTLYLQMSSLKSEGTAMYYCARHNYSNWDWFAY | | |
| WGQGTLVTVSA | | |
| EVQLQQSGAELVKPGASVKLSCTPSGFNIKDTSLHWVKQGPEQGLEWIGRIDPAN | 22 | 278 |
| GNTKYDPKFQGKATITADTSSNTAYLQLSSLTSEDTAVYYCARGPDDGYFYYYSMD | | |
| YWGQGTSVTVSS | | |
| QVQLQQSGAELMKPGASVKISCKATGYTFSSYWIEWVKQRPGHGLEWIGEILPGS | 23 | 27 |
| GSTSYNEKFKGKATFTADTSSNTAYMQLSSLTSEDSAVYYCARRGYGYDEGFDYW | | |
| GQGTTLTVSS | | |
| QVQLQQPGAELVRPGASVKLSCKASGYTFTNYWMNWVKQRPGQGLEWIGLIDP | 24 | 280 |
| SDSETHYNQVFKDKATLTVDKSSSTAYMQLSSLTSEDSAVYYCATYDVYYRFAYWG | | |
| QGTLVTVSA | | |
| QVQLQQPGAELVRPGASVKLSCKASGYTFTSYWINWVKQRPGQGLEWIGNIYPS | 25 | 281 |
| DSYTNYNQKFKDKATLTVDKSSSTAYMQLSSPTSEDSAVYYCTRGNYIDYWGQGT | | |
| TLTVSS | | |
| QVQLKESGPGLVAPSQSLSIPCTVSGFSLTSYGVHWVRQPPGKGLEWLGVIWAGG | 26 | 282 |
| TTNYNSALMSRLSISKDNSKSQVFLKMYSLQTDDTAMYYCARGDGYDDGYAMDY | | |
| WGQGTSVTVSS | | |
| QVQLQQSGAELVKPGASVKLSCKASGSTFTTYYIYWVKQRPGQGLEWIGEINPSN | 27 | 283 |
| GGTNFNEKFKSKATLTVDKSSSTAYMQLSSLTSEDSAVYYCTSYYTHETYYYAMDY | | |
| WGQGTSVTVSS | | |
| QVQLQQPGAELVKPGASVKLSCKASGYTFTSYWMQWVKQRPGQGLEWIGEIDP | 28 | 284 |
| SDSYTNYNQKFKGKATLTVDTSSSTAYMQLSSLTSEDSAVYYCARAEYGYGNYPWF | | |
| AYWGQGTLVTVSA | | |
| QVQLQQPGAELVKPGASVKVSCKASGYTFTSYWMHWVKQRPGQGLEWIGRIHP | 29 | 285 |
| SDSDTNYNQKFKGKATLTVDKSSSTAYMQLSSLTSEDSAVYYCAIPYYYGGWYFDV | | |
| WGTGTTVTVSS | | |
| EVKLVESGGDLVKPGGSLKLSCAASGFTFSSYGMSWVRQTPDKRLEWVATISSGG | 30 | 286 |
| SYTYYPDSVKGRFTISRDNAKNTLYLQMSSLKSEDTAMYYCARLYDAHWDYFDYW | | |
| GQGTTLTVSS | | |
| QVQLQQPGSVLVRPGASVKLSCKASGYTFTSSWMHWAKQRPGQGLEWIGEIHP | 31 | 287 |
| NSGNTNYNEKFKGKATLTVDTSSSTAYVDLSSLTSEDSAVYYCAIYYDYDAYYFD | | |
| YWGQGTTLTVSS | | |
| QVQLQQPGAELVKPGASVKLSCKASGYTFTSYWMHWVKQRPGQGLEWIGMIHP | 32 | 288 |
| NSGSTNYNEKFKSKATLTVDKSSSTAYMQLSSLTSEDSAVYYCANPYYGYDVGYW | | |
| GQGTTLTVSS | | |
| EVQLVESGGDLVKPGGSLKLSCAASGFTFSSYGMSWVRQTPDKRLEWVATISSGG | 33 | 289 |
| SYTYYPDSVKGRFTISRDNAKNTLYLQMSSLKSEDTAMYYCTRHDDSSYDWFAYW | | |
| GQGTLVTVSA | | |
| QVQLQQPGAELVKPGASVKLSCKASGYTFTNYWMHWVKQRPGQGLEWIGMIH | 34 | 290 |
| PNSGTTNYNEKFKSKATLTVDKSSSTTYMQLISLTSEDSAVYYCARFGDGYHFDYW | | |
| GQGTTLTVSS | | |
| QVQLQQSGPELKKPGETVKISCKASGYTFTNYGMNWVKQAPGKGLKWMGWIN | 35 | 291 |
| TNTGEPTYAEEFKGRFAFSLETSASTAYLQINNLKNEDTATYFCARWYPYFDYWGQ | | |
| GTTLTVSS | | |
| QVQLQQSGAELAKPGASVKLSCKASGYTFTSYWMHWVKQRPGQGLEWIGYINP | 36 | 292 |
| SSGYTKYNQKFKDKATLTADKSSSTAYMQLSSLTYEDSAVYYCARSDGSSGNWYFD | | |
| VWGTGTTVTVSS | | |
| QVQLQQPGAELVKPGASVKLSCKASGYTFTSYWMHWVKQRPGQGLEWIGMIHP | 37 | 293 |
| NSGSTNYNEKFKSKATLTVDKSSSTAYMQLSSLTSEDSAVYYCARDYGNYDYAMD | | |
| YWGQGTSVTVSS | | |
| QVQLQQSGAELMKPGASVKISCKATGYTFSSYWIEWVKQRPGHGLEWIGEILPGS | 38 | 294 |
| GSTSYNEKFKDKATFTADTSSNTAFMQLSSLTSEDSAVYYCARRAYGYDEGFDYW | | |
| GQGTTLTVSS | | |
| QVQLQQSGAELMKPGASVKISCKATGYTFSSYWIEWVRQAPGHGLEWIGEVLPG | 39 | 295 |
| SGSTSYNEKFKGRATFTADTSSNTAYMQLSSLRSEDSAVYYCARRAYGYDEGFDY | | |
| WGQGTTVTVSS | | |
| QVQLQQSGAELMKPGASVKISCKATGYTFSSYWIEWVRQAPGHGLEWIGEILPGS | 40 | 296 |
| GRTSYIEKFKGRATFTADTSSNTAYMQLSSLRSEDSAVYYCARRGYGYDEGFDYWG | | |
| QGTTVTVSS | | |
| QVQLQQSGAELMKPGASVKISCKATGYTFSSYWIEWVKQRPGHGLEWIGEVLPG | 41 | 297 |
| SGSTSYNEKFKGKATFTADTSSNTAYMQLSSLTSEDSAVYYCARRAYGYDEGFDYW | | |
| GQGTTLTVSS | | |
| QVQLQQSGAELMKPGASVKISCKATGYTFSSYWIEWVKQRPGHGLEWIGEILPGS | 42 | 298 |
| GRTSYIEKFKGKATFTADTSSNTAYMQLSSLTSEDSAVYYCARRGYGYDEGFDYWG | | |
| QGTTLTVSS | | |
| QVQLQQSGAELMKPGASVKISCKATGYTFSSYWIEWVKQRPGHGLEWIGEILPGS | 43 | 299 |
| GSTNYNEKFKGKATFTADTSSNTAYMQLSSLTSEDSAVYYCARRAYGYDGGFDYW | | |
| GQGTTLTVSS | | |
| QVQLQQSGAELMKPGASVKISCKATGYTFSSYWIEWVKQRPGHGLEWIGEILPGS | 44 | 300 |
| DSTSYNEKFKGKTTFTADTSSNTAYMQLSSLTSEDSAVYYCARRAYGYDEGFDYW | | |
| GQGTTLTVSS | | |
| QVQLQQSGAELMKPGASVKISCKATAYTFSIYWIEWVKQRPGHGLEWIGEILPGS | 45 | 301 |
| GSTNYNEKVKGKATFTADTSSNTAYMQLSSLTSEDSAVYYCARRAYGYDGGFDYW | | |
| GQGTTLTVSS | | |
| QVQLQQSGAELMKPGASVKISCKATGYTFSSYWIEWVKQRPGHGLEWIGEIFPGS | 46 | 302 |
| GHTSFNEKFKGKATFTADTSSNTAYIQLSSLTSEDSAVYYCARRGYGYDEGFDYWG | | |
| QGTTLTVSS | | |
| QVQLQQSGAELMKPGASVKMSCKATGYTFSNYWIEWVKQRPGHGLEWIGEILP | 47 | 303 |
| GSGSTSYNEKFKGKATFTADTSSSTAYMQLSSLTSEDSAVYYCARRGYGYDEGFDY | | |
| WGQGSTLTVSS | | |
| QVQLQQSGAELMKPGASVKISCKATGYTFSSYWIEWVKQRPGHGLEWIGEILPGS | 48 | 304 |
| GSTSYNEKFKGKATFTADTSSNTAYMQLSSLTSEDSAVYYCARRGYGYDEGFDYW | | |
| GQGTTLTVSS | | |
| QVQLQQSGAELMKPGASVKISCKATGYTFSSYWIEWVQQRPGHGLEWIGEILPGS | 49 | 305 |
| GYTSYIEQFKGKATFTADTSSNTAYMQLGSLTSEDSAVYYCARRGYGYDEGFDYW | | |
| GQGTTLTVSS | | |
| QVQLQQSGAELMKPGASVKISCKATGYTLSSYWIEWVKQRPGHGLEWIGEILPGS | 50 | 306 |
| GSTSYNEKFKGKATFTADTSSSTAYMQLSSLTSEDSAVYYCARRGYGYDEGFDYWG | | |
| QGTTLTVSS | | |
| QVQLQQSGAELMKPGASVKISCKGTGYTFSSYWIEWVKQRPGHGLEWIGEISPGS | 51 | 307 |
| GSTNYNEKFKGKATFTADTSSNTAYMQLSSLTSEDSAVYYCARRGYGYDEGFDYW | | |
| GQGTTLTVSS | | |
| QVQLQQSGAELMKPGASVKISCKATGYTFGTYWIEWVKQRPGHGLEWIGEILPGS | 52 | 308 |
| GTPNYNEKFKGKATFTADTSSNTAYMQLSSLTSEDSAVYYCARRAYGYDAGFDYW | | |
| GQGTTLTVSS | | |
| QVQLQQSGAELMKPGASVKISFKATGYTFSSYWIEWVKQRPGHGLEWIGEILPGS | 53 | 309 |
| GSTSCNEKFKGKATFTADTSSNTAYMQLSSLTSEDSAVYYCARRGYGYDEGFDYW | | |
| GQGTTLTVSS | | |
| QVQLQQSGAELMKPGASVKISCKATGYTFSSYWIEWVKQRPGHGLEWIGEILPGS | 54 | 310 |
| GRTSYIEKFKGKATFTADTSSNTAYMQLSSLTSEDSAVYYCARRGYGYDEGFDYWG | | |
| QGTTLTVSS | | |
| QVQLQQSGAELMKPGASVKMSCKATGYTFSNYWIEWVKQRPGHCLEWIGEILP | 55 | 311 |
| GSGSTSYNEKFKGKATFTADTSSSTAYMQLSSLTSEDSAVYYCARRGYGYDEGFDY | | |
| WGQGSTLTVSS | | |
| QVQLQQSGAELMKPGASVKISCKATGYTFSSYWIEWVKQRPGHCLEWIGEILPGS | 56 | 312 |
| GSTSYNEKFKGKATFTADTSSNTAYMQLSSLTSEDSAVYYCARRGYGYDEGFDYW | | |
| GQGTTLTVSS | | |
| LVKTGASVKISCKASGYSFTGYYMHWVKQSHGKSLEWIGYISSYNGVTGYNQKFK | 57 | 313 |
| GKATFTVDTSSSTAYMQFNSLTSEDSAVYYCARGRYGDYFDYWGQGTTLTVSS | | |
| LVKTGASVKISCKASGYSFTGYYMHWVKQSHGKSLEWIGYISSYNGATSYNQKFKG | 58 | 314 |
| KATFTVDTSSSTAYMQFNSLTSEDSAVYYCARGRYGEYFDYWGQGTTLTVSS | | |
| QVQLKQSGPGLVQPSQSLSITCTVSGFSLSSYGVHWVRQSPGKALEWLGVIWRG | 59 | 315 |
| GSTDYNAAFMSRLSITKDNSKSQVFFKMNSLQADDTAIYYCAKNLYGHYVMDYW | | |
| GQGTSVTVSS | | |
| QVQLKQSGPGLVQPSQSLSITCTVSGFSVTSYGVHWVRQSPGKGLEWLGVIWRG | 60 | 316 |
| GSTDYNAAFMSRLSITKDNSKSQVFFKMNSLQADDSAIYYCAKNLYGHYVMDYW | | |
| GQGTSVTVSS | | |
| QVQLKQSGPGPVQPSQSLSITCTVSGFSLTSYGVHWVRQSPGKGLEWLGVIWRG | 61 | 317 |
| GSTDNNAAFMSRLSITKDNSKSQVFFKMNSLQADDTAIYYCAKNLYGHYVMDYW | | |
| GQGTSVTVSS | | |
| QVQLKQSGPGLVQPSQSLSITCTVSGFSLTRYGVHWVRQSPGKGLEWLGVIWRG | 62 | 318 |
| GSTDHNAAFMSRLSITKDNSKSQVFFKMNSLQADDTAIYYCAKNLYGHYVMDYW | | |
| GQGTSVTVSS | | |
| QVQLKQSGPGLVQPSQSLSITCTVSGFSVTTYGVHWVRQSPGKGLEWLGVIWRG | 63 | 319 |
| GSTDYNAAFMSRLSITKDNSKSQVFFKMNSLQADDTAIYYCAKNLYGHYVMDYW | | |
| GQGTSVTVSS | | |
| QVQLQQPGAELVKPGASVKLSCKASGYTFTSYWMHWVKQRPGQGLEWIGMIHP | 64 | 320 |
| NSGSTNYNEKFKSKATLTVDKSSSTAYMQLSSLTSEDSAVYYCARWGDGYSFAYW | | |
| GQGTLVTVSA | | |
| QVQLQQPGAELVKPGASVKLSCKASGYTFTSYWMHWVKQRPGQGLEWIGMIHP | 65 | 321 |
| NSGTTNYNEKFKSKATLTVDKSSSTAYMQLSSLTSEDSAVYYCARWGDGYSFAYW | | |
| GQGTLVTVSA | | |
| QVQLKQSGPELVKPGASVKMSCKASGYTFTDYVINWVKQRTGQGLEWIGEIYPGS | 66 | 322 |
| GSTYYNEKFKGKATLTADKSSNTVYMQLSSLTSEDSAVYFCARRGERGPWFAYWG | | |
| QGTLVTVSA | | |
| QVQLKQSGPELVKPGASVKMSCKASGYTFTDYVINWVKQRTGQGLEWIGEIYPGS | 67 | 323 |
| GSSYYNEKFKGKATLTADKSSNTAYMQLSSLTSEDSAVYFCARRGERGPWFAYWG | | |
| QGTLVTVSA | | |
| QVQLKQSGPELVKPGASVKMSCKASGYTFTDYVINWVKQRTGQGLEWIGEIYPGS | 68 | 324 |
| GSSYYNEKFRGKATLTADKSSNTAYMQLSSLTSEDSAVYFCARRGERGPWFAYWG | | |
| QGTLVTVSA | | |
| QVQLKQSGPELVKPGASVKMSCKASGYTFTDYVINWVKQKTGQGLEWIGEIYPGS | 69 | 325 |
| GSSYYNEKFKGKATLTADKSSNTAYIQLSSLTSEDSAVYFCARRGERGPWFAYWGQ | | |
| GTLVTVSA | | |
| QVQLQQPGAELVKPGASVKLSCKASGYTFTSYWMHWVKQRPGQGLEWIGMIHP | 70 | 326 |
| NSGSPNYNEKFKSKATLTVDKSSSTAYMQLSSLTSEDSAVYYCARPGGYGFAYWG | | |
| QGTLVTVSA | | |
| QVQLQQSGPELVKPGASVKMSCKASGYTFTDYVISWVKQRTGQGLEWIGEIYPGS | 71 | 327 |
| GSSYYNEKFKGKATLTADKSSNTAYMQLSSLTSEDSAVYFCARPGDLGFAYWGQG | | |
| TLVTVSA | | |
| QVQLQQSGPELVKPGASVKMSCKASGYTFTDYVISWVKQRTGQGLEWIGEIYPGS | 72 | 328 |
| GSSYYNEKFKGKATLTADKSSNTAYMQLSSLTSEDSAVYFCARPGDLGFAYWGQG | | |
| TLVTVSA | | |
| QVQLQQSGPELVKPGASVKMSCKASGYTFTDYVISWVKQRTGQGLEWIGEIYPGS | 73 | 329 |
| GSNYYNEKFKGKAIMTADKSSNTAYMQLSSLTSEDSAVYFCARPGDLGFAYWGQ | | |
| GTLVTVSA | | |
| QVQLQQSGPELVKPGASVKMSCKASGYTFTDYVISWVKQRTGQGLEWIGEIYPGS | 74 | 330 |
| GSSYYNEKFKGKATLTADKSSNTAYMQLSSLTSEDSAVYFCARPGDLGFAYWGQG | | |
| TLVTVSA | | |
| QVQLQQSGPELVKPGASVKMSCKASGYTFTDYVISWVRQAPGQGLEWIGEIYPG | 75 | 331 |
| SGSSYYNEKFKGRATLTADKSSNTAYMQLSSLRSEDSAVYFCARPGDLGFAYWGQ | | |
| GTLVTVSS | | |
| QVQLQQSGPELVKPGASVKMSCKASGYTFTDYVISWVKQRTGQGLEWIGEIYPGS | 76 | 332 |
| GSSYYNEKFKGKATLTADKSSNTAYMQLSSLTSEDSAVYFCARPGDLGFAYWGQG | | |
| TLVTVSS | | |
| QVQLKESGPGLVAPSQSLSITCTVSGFSLTNYGVHWVRQPPGKGLEWLGVVWAG | 77 | 333 |
| GITNYNWALMSRLSISKDNSKSQVFLKMNSLQTDDTAMYYCARGDGYDDGYAM | | |
| DYWGQGTSVTVSS | | |
| QVQLKESGPGLVAPSQSLSITCTVSGFSLTSYGVHWVRQPPGKGLEWLGVLWAG | 78 | 334 |
| GITNYNSALMSRLSIRKDNSKSQVFLKMYSLHTDDTAMYYCARGDGYDDGYAMD | | |
| YWGQGTSVTVSS | | |
| QVQLKESGPGLVAPSQSLSIPCTVSGFSLTSYGVHWVRQPPGKGLEWLGVIWAGG | 79 | 335 |
| TTNYNSALMSRLSISKDNSKSQVFLKMYSLQTDDTAMYYCARGDGYDDGYAMDY | | |
| WGQGTSVTVSS | | |
| EVQLQQSGAELVRSGASVKLSCTASGFNIKDYYMHWVKQRPEQGLEWIGWIDPE | 80 | 336 |
| NGDTEYAPKFQGKATMTADTSSNTAYLQLSSLTSEDTAVYYCNAPLLRYSSAMDY | | |
| WGQGTSVTVSS | | |
| EVQLQQSGAELVRSGASVKLSCTASGFNIKDYYIHWVKQRPEQGLEWIGWIDPEN | 81 | 337 |
| GDTEYAPKFQGKATMTADTSSNTAYLQLSSLTSEDTAVYYCNAPLLRYSSSMDYW | | |
| GQGTSVTVSS | | |
| EVQLQQSGAELVRSGASVKLSCTASGFNIKDYYMHWVKQRPEQGLEWIGWIDPE | 82 | 338 |
| NGDTEYAPKFQGKATMTADTSSNTAYLQLSSLTSEDTAVYYCNVALLRYSSAMDY | | |
| WGQGTSVTVSS | | |
| QVQLQQSGPELVKPGASVKMSCKASGYTFTDYVISWVKQRTGQGLEWIGEIYPGS | 83 | 339 |
| GSTYYNEKFKGKATLTADKSSNTAYMQLSSLTSEDSAVYFCARRGERGPWFAYWG | | |
| QGTLVTVSA | | |
| QVQLQQPGAELVKPGASVKLSCKASGYTFTSYWMQWVKQRPGQGLEWIGEIDP | 84 | 340 |
| SDSYTNYNQKFKGKATLTVDTSSSTAYMQLSSLTSEDSAVYYCARAEYGYGNYPWF | | |
| AYWGQGTLVTVSA | | |
| QVQLQQSGPELKKPGETVKISCKASGYTFTNYGMNWVKQAPGKGLKWMGWIN | 85 | 341 |
| TYTGEPTYADDFKGRFAFSLETSASTAYLQINNLKNEDMATYFCARKYYDYEFAYW | | |
| GQGTLVTVSA | | |
| QVQLQQSGAELVRPGASVTLSCKASGYTFTDYEMHWVKQTPVHGLEWIGAIDPE | 86 | 342 |
| TGGTAYNQKFKVKAILTADKSSSTAYMELRSLTSEDSAVYYCTRLGDYDVMDYWG | | |
| QGTSVTVSS | | |
| QVQLQQPGSVLVRPGASVKLSCKASGYTFTSSWMHWAKQRPGQGLEWIGEIHP | 87 | 343 |
| NSGNTNYNEKFKGKATLTVDTSSSTAYVDLSSLTSEDSAVYYCAIYYDYDAYYF | | |
| DYWGQGTTLTVSS | | |
| QVQLQQSGPELVKPGASVKMSCKASGYTFTDYVISWVKQRTGQGLEWIGEIYPGS | 88 | 344 |
| GSNYYNEKFKGKATLTADKSSNTAYMQLSSLTSEDSAVYFCAREEKIYFDYWGQGT | | |
| TLTVSS | | |
| EVQLQQSGTVLARPGASVKMSCKTSGYTFTSYWMHWIKQRPGQGLEWIGAIYP | 89 | 345 |
| GNSDTTYNQKFKGKAKLTAVTSASTAYMELSSLTNEDSAVYYCTSLITTAYYFDYW | | |
| GQGTTLTVSS | | |
| QVQLQESGGGLVKPGGSLKLSCAASGFTFSSYAMSWVRQTPEKRLEWVATISSGG | 90 | 346 |
| SYTYYPDSVKGRFTISRDNAKNTLYLQMSSLRSEDTAMYYCARHEEANWAWFAY | | |
| WGQGTLVTVSA | | |
| QVQLQQSGPQLVSPGASVKISCKASGYSFTNYWMHWVKQRPGQGLEWIGMIDP | 91 | 347 |
| SDSETRLNQQFKDKATLTVDESSSTAYMQLSSPTSEDSAVYYCAIPYYAMDYWGQ | | |
| GTSVTVSS | | |
| QVQLQQPGSVLVRPGASVKLSCKASGYTFTSSWMHWAKQRPGQGLEWIGEIHP | 92 | 348 |
| NSGNTNYNEKNKGKATLTVDTSSSTAYVDLSSLTSEDSAVYYCATYYGNYVWYFDV | | |
| WGAGTSVTVSS | | |
| QVQLQQPGAELVKPGASVKLSCKASGYTFTSYWMHWVKQRPGQGLEWIGMIHP | 93 | 349 |
| NSGSTNYNEKFKSKATLTVDKSSSTAYMQLSSLTSEDSAVYYCASYGSSYWYFDVW | | |
| GTGTTVTVSS | | |
| QVQLKQSGPGLVQPSQSLSITCTVSGFSLTSYGVHWVRQSPGKGLEWLGVIWSG | 94 | 350 |
| GSTDYNAAFISRLSISKDNSKSQVFFKMNSLQANDTAIYYCASYYGSSRSYWYLDV | | |
| WGAGTTVTVSS | | |
| QVKLVESGGDLVKPGGSLKLSCAASGFTFSSYGMSWVRQTPDKRLEWVATISSGG | 95 | 351 |
| SYTYYPDSVKGRFTISRDNAKNTLYLQMSSLKSEDTAMYYCARQNDSSWAWFAY | | |
| WGQGTLVTVSA | | |
| QVQLQQPGAELVKPGASVKLSCKASGYTFTSYWMHWVKQRPGQGLEWIGMIHP | 96 | 352 |
| NSGSTNYNEKFKSKATLTVDKSSSTAYMQLSSLTSEDSAVYYCALPYSNYGWYFDV | | |
| WGTGTTVTVSS | | |
| QVQLQQPGAELVRPGSSVKLSCKASGYTFTSYWMHWVKQRPIQGLEWIGNIDPS | 97 | 353 |
| DSETHYNQKFKDKATLTVDKSSSTAYMQLSSLTSEDSAVYYCARDYYGSYWYFDV | | |
| WGTGTTVTVSS | | |
| EVQLQQSGAELVKPGASVKLSCTASGFNIKDYYMHWVKQRTEQGLEWIGRIDPE | 98 | 354 |
| DGETKYAPKFQGKATITADTSSNTAYLQLSSLTSEDTAVYYCAAYGNSAWFAYWG | | |
| QGTLVTVSA | | |
| QVQLQQSGPELKKPGETVKISCKASGYTFTNYGMNWVRQAPGKGLEWMGWIN | 99 | 355 |
| TNTGEPTYAEEFKGRFAFSLETSASTAYLQINNLRNEDTATYFCARWYPYFDYWGQ | | |
| GTTVTVSS | | |
| QVQLQQSGPELKKPGETVKISCKASGYTFTNYGMNWVKQAPGKGLKWMGWIN | 100 | 356 |
| TNTGEPTYAEEFKGRFAFSLETSASTAYLQINNLKNEDTATYFCARWYPYFDYWGQ | | |
| GTTLTVSS | | |
| QVQLQQSGAELAKPGASVKLSCKASGYTFTSYWMHWVKQRPGQGLEWIGYINP | 101 | 357 |
| SSGYTKYNQKFKDKATLTADKSSSTAYMQLSSLTYEDSAVYYCARSDGSSGNWYFD | | |
| VWGTGTTVTVSS | | |
| QVQLKESGPGLVAPSQSLSITCTVSGFSLTSYGVHWVRQPPGKGLEWLGVIWAGG | 102 | 358 |
| STNYNSALMSRLSISKDNSKSQVFLKMNSLQTDDTAMYYCAREGGYTGYFDVWG | | |
| AGTTVTVSS | | |
| QVQLQQPGAELVRPGSSVKLSCKASGYTFTSYWMHWVKQRPIQGLEWIGNIDPS | 103 | 359 |
| DSETHYNQKFKDKATLTVDKSSSTAYMQLSSLTSEDSAVYYCAYSNYVPYYAMDY | | |
| WGQGTSVTVSS | | |
| QVQLQQPGAELVKPGASVKLSCKASGYTFTSYWMHWVKQRPGQGLEWIGMIHP | 104 | 360 |
| NSGSTNYNEKFKSKATLTVDKSSSTAYMQLSSLTSEDSAVYYCARDYGNYDYAMD | | |
| YWGQGTSVTVSS | | |
| EVQLQQSGAELVRPGALVKLSCKASGFNIKDYFMHWVKQRPEQCLEWIGWIDPE | 105 | 361 |
| TDNTIYDPKFQGKASITADTSSNTAYLQLSSLTSEDTAVYYCARSGNMGFTYWGQ | | |
| GTLVTVSA | | |
| EVMLVESGGGLVKPGGSLKLSCAASGFTFSSYAMSWVRQTPEKCLEWVATISSGG | 106 | 362 |
| SYTYYPDSVKGRFTISRDNAKNTLYLQMSSLRSEDTAMYYCASQGGSSWGAMDY | | |
| WGQGTSVTVSS | | |
| QVQLKQSGPGLVQPSQSLSITCTVSGFSLTSYGVHWVRQSPGKCLEWLGVIWSGG | 107 | 363 |
| STDYNAAFISRLSISKDNSKSQVFFKMNSLQADDTAIYYCARKGYGYDWYFDVWG | | |
| TGTTVTVSS | | |
| QVQLQQPGAELVMPGASVKLSCKASGYTFTSYWMHWVKQRPGQCLEWIGEIDP | 108 | 364 |
| SDSYTNYNQKFKGKATLTVDKSSSTAYMQLSSLTSEDSAVYYCARSSYYYYAMDYW | | |
| GQGTSVTVSS | | |
| QVQLQQSGAELMKPGASVKISCKATGYTFSSYWIEWVKQRPGHGLEWIGEILPGS | 109 | 365 |
| GSTNYNEKFKGKATFTADTSSNTAYMQLSSLTSEDSAVYYCARRAYGYDGGFDYW | | |
| GQGTTLTVSS | | |
| QVQLQQSGAELMKPGASVKISFKATGYTFSSYWIEWVKQRPGHGLEWIGEILPGS | 110 | 366 |
| GSTNYIEKFKGKATFTADTSSNTAYMQLSSLTSEDSAVYYCARRAYGYDEGFDYWG | | |
| QGTTLTVSS | | |
| QVQLQQSGAELMKPGASVKISCKATGYTFSSYWIEWVKQRPGHGLEWIGEILPGS | 111 | 367 |
| DSTSYNEKFKGKTTFTADTSSNTAYMQLSSLTSEDSAVYYCARRAYGYDEGFDYW | | |
| GQGTTLTVSS | | |
| QVQLQQSGAELMKPGASVKISCKATAYTFSIYWIEWVKQRPGHGLEWIGEILPGS | 112 | 368 |
| GSTNYNEKVKGKATFTADTSSNTAYMQLSSLTSEDSAVYYCARRAYGYDGGFDYW | | |
| GQGTTLTVSS | | |
| QVQLQQSGAELMKPGASVKISCKATGYTFSSYWIEWVKQRPGHGLEWIGEILPGS | 113 | 369 |
| GSTNYNEKFKGKATFTADTSSNTAYMQLSSLTSEDSAVYYCARRGYGYDEGFDYW | | |
| GQGTTLTVSS | | |
| QVQLQQSGAELMKPGASVKISCKATGYTFSSYWIEWVKQRPGHGLEWIGEILPGS | 114 | 370 |
| GSTNYNEKFKGKATFTADTSSNTAYMQLSSLTSEDSAVYYCARRGYGYDEGFDYW | | |
| GQGTTLTVSS | | |
| QVQLQQSGAELMKPGASVKMSCKATGYTFSNYWIEWVKQRPGHGLEWIGEILP | 115 | 371 |
| GSGSTSYNEKFKGKATFTADTSSSTAYMQLSSLTSEDSAVYYCARRGYGYDEGFDY | | |
| WGQGSTLTVSS | | |
| QVQLQQSGAELMKPGASVKISCKATGYTFSSYWIEWVQQRPGHGLEWIGEILPGS | 116 | 372 |
| GYTSYIEQFKGKATFTADTSSNTAYMQLGSLTSEDSAVYYCARRGYGYDEGFDYW | | |
| GQGTTLTVSS | | |
| QVQLQQSGAELMKPGASVKISCKATGYTFSSYWIEWVKQRPGHGLEWIGEILPGS | 117 | 373 |
| GSTSYNEKFKDKATFTADTSSNTAFMQLSSLTSEDSAVYYCARRAYGYDEGFDYW | | |
| GQGTTLTVSS | | |
| QVQLQQSGAELMKPGASVKISCKATGYTFSSYWIEWVKQRPGHGLEWIGEVLPG | 118 | 374 |
| SGSTSYNEKFKGKATFTADTSSNTAYMQLSSLTSEDSAVYYCARRAYGYDEGFDYW | | |
| GQGTTLTVSS | | |
| QVQLQQSGAELMKPGASVKISCKGTGYTFSSYWIEWVKQRPGHGLEWIGEISPGS | 119 | 375 |
| GSTNYNEKFKGKATFTADTSSNTAYMQLSSLTSEDSAVYYCARRGYGYDEGFDYW | | |
| GQGTTLTVSS | | |
| QVQLQQSGAELMKPGASVKISCKATGYTFGTYWIEWVKQRPGHGLEWIGEILPGS | 120 | 376 |
| GTPNYNEKFKGKATFTADTSSNTAYMQLSSLTSEDSAVYYCARRAYGYDAGFDYW | | |
| GQGTTLTVSS | | |
| QVQLQQSGAELMKPGASVKISFKATGYTFSSYWIEWVKQRPGHGLEWIGEILPGS | 121 | 377 |
| GSTSCNEKFKGKATFTADTSSNTAYMQLSSLTSEDSAVYYCARRGYGYDEGFDYW | | |
| GQGTTLTVSS | | |
| QVQLQQSGAELMKPGASVKISCKATGYTFSSYWIEWVKQRPGHGLEWIGEILPGS | 122 | 378 |
| GRTSYIEKFKGKATFTADTSSNTAYMQLSSLTSEDSAVYYCARRGYGYDEGFDYWG | | |
| QGTTLTVSS | | |
| QVQLQQSGAELMKPGASVKISCKATGYTFSSYWIEWVKQRPGHGLEWIGEILPGS | 123 | 379 |
| GRTSYIEKFKGKATFTADTSSNTAYMQLSSLTSEDSAVYYCARRGYGYDEGFDYWG | | |
| QGTTLTVSS | | |
| QVQLKQSGPGLVQPSQSLSITCTVSGFSLSSYGVHWVRQSPGKALEWLGVIWRG | 124 | 380 |
| GSTDYNAAFMSRLSITKDNSKSQVFFKMNSLQADDTAIYYCAKNLYGHYVMDYW | | |
| GQGTSVTVSS | | |
| QVQLKQSGPGLVQPSQSLSITCTVSGFSVTSYGVHWVRQSPGKGLEWLGVIWRG | 125 | 381 |
| GSTDYNAAFMSRLSITKDNSKSQVFFKMNSLQADDSAIYYCAKNLYGHYVMDYW | | |
| GQGTSVTVSS | | |
| QVQLKQSGPGPVQPSQSLSITCTVSGFSLTSYGVHWVRQSPGKGLEWLGVIWRG | 126 | 382 |
| GSTDNNAAFMSRLSITKDNSKSQVFFKMNSLQADDTAIYYCAKNLYGHYVMDYW | | |
| GQGTSVTVSS | | |
| QVQLKQSGPGLVQPSQSLSITCTVSGFSLTRYGVHWVRQSPGKGLEWLGVIWRG | 127 | 383 |
| GSTDHNAAFMSRLSITKDNSKSQVFFKMNSLQADDTAIYYCAKNLYGHYVMDYW | | |
| GQGTSVTVSS | | |
| QVQLKQSGPGLVQPSQSLSITCTVSGFSVTTYGVHWVRQSPGKGLEWLGVIWRG | 128 | 384 |
| GSTDYNAAFMSRLSITKDNSKSQVFFKMNSLQADDTAIYYCAKNLYGHYVMDYW | | |
| GQGTSVTVSS | | |
| QVQLKQSGPGLVQPSQSLSITCTVSGFSVTSYGVHWVRQSPGKGLEWLGVIWRG | 129 | 385 |
| GSTDYNAAFMSRLSITKDNSKSQVFFKMNSLQADDTAIYYCAKNLYGHYVMDYW | | |
| GQGTSVTVSS | | |
| QVQLKQSGPGLVQPSQSLSITCTVSGFSLTRYGVHWVRQSPGKGLEWLGVIWRG | 130 | 386 |
| GSTDHNAAFMSRLSITKDNSKSQVFFKMNSLQADDTAIYYCAKNLYGHYVMDYW | | |
| GQGTSVTVSS | | |
| QVQLQQPGAELVKPGASVKLSCKASGYTFTSYWMHWVKQRPGQGLEWIGMIHP | 131 | 387 |
| NSGSTNYNEKFKSKATLTVDKSSSTAYMQLSSLTSEDSAVYYCARWGDGYSFAYW | | |
| GQGTLVTVSA | | |
| QVQLQQPGAELVKPGASVKLSCKASGYTFTSYWMHWVKQRPGQGLEWIGMIHP | 132 | 388 |
| NSGSTNYNEKFKSKATLTVDKSSSTAYMQLSSLTSEDSAVYYCARWGDGYSFAYW | | |
| GQGTLVTVSA | | |
| QVQLQQPGAELVKPGASVKLSCKASGYTFTTYWMHWVKQRPGQGLEWIGMIH | 133 | 389 |
| PNSDNTNYNEKFKSKATLTVDKSSSTAYIQLSSLTSEDSAVYYCARWGDGYSFAYW | | |
| GQGTLVTVSA | | |
| QVQLQQPGAELVKPGASVKLSCKASGYTFTSYWMHWVKQRPGQGLEWIGMIHP | 134 | 390 |
| NSGNTNYNEKFKSKATLTVDKSSSTAYMQLSSLTSEDSAVYYCARWGDGYSFAYW | | |
| GQGTLVTVSA | | |
| QVQLKQSGPELVKPGASVKMSCKASGYTFTDYVINWVKQRTGQGLEWIGEIYPGS | 135 | 391 |
| GSTYYNEKFKGKATLTADKSSNTVYMQLSSLTSEDSAVYFCARRGERGPWFAYWG | | |
| QGTLVTVSA | | |
| QVQLKQSGPELVKPGASVKMSCKASGYTFTDYVINWVKQRTGQGLEWIGEIYPGS | 136 | 392 |
| GSSYYNEKFKGKATLTADKSSNTAYMQLSSLTSEDSAVYFCARRGERGPWFAYWG | | |
| QGTLVTVSA | | |
| QVQLKQSGPELVKPGASVKMSCKASGYTFTDYVINWVKQRTGQGLEWIGEIYPGS | 137 | 393 |
| GSSYYNEKFRGKATLTADKSSNTAYMQLSSLTSEDSAVYFCARRGERGPWFAYWG | | |
| QGTLVTVSA | | |
| QVQLKQSGPELVKPGASVKMSCKASGYTFTDYVINWVKQKTGQGLEWIGEIYPGS | 138 | 394 |
| GSSYYNEKFKGKATLTADKSSNTAYIQLSSLTSEDSAVYFCARRGERGPWFAYWGQ | | |
| GTLVTVSA | | |
| QVQLQQPGAELVRPGASVKLSCKASGYTFTNYWMNWVKQRPGQGLEWIGMID | 139 | 395 |
| PSDSETHYNQMFKDKATLTVDKSSSTAYMQLSSLTSEDSAVYYCATYDGYYRFAY | | |
| WGQGTLVTVSA | | |
| QVQLQQPGAELVRPGASVRLSCKASGYTFTNYWMNWVKQRPGQGLEWIGMID | 140 | 396 |
| PSDSETHFNQMFKDKATLTVDKSSSTAYMQVSSLTSEDSAVYYCATYDIYYRFAYW | | |
| GQGTLVTVSA | | |
| QVQLQQPGAELVKPGASVKLSCKASGYTFTSYWMHWVKQRPGQGLEWIGMIHP | 141 | 397 |
| NSDSTNYNEKFKSKATLTVDKSSSTAYMHLSSLTSEDSAVYYCARPGGYGFADWG | | |
| QGTLVTVSA | | |
| QVQLQQPGAELVKPGASVKLSCKASGYTFTTYWMHWVKQRPGQGLEWIGMIH | 142 | 398 |
| PNSGSTNYNEKFKSKATLTVDKSSSTAYMQLSSLTSEDSAVYYCARPGGYGFTYWG | | |
| QGTLVTVSA | | |
| QVQLQQPGAELVKPGASVKLSCKASGYTFTSYWMHWVKQRPGQGLEWIGMIHP | 143 | 399 |
| NSGSPNYNEKFKSKATLTVDKSSSTAYMQLSSLTSEDSAVYYCARPGGYGFAYWG | | |
| QGTLVTVSA | | |
| QVQLQQPGAELVRPGASVKLSCKASGYTFTSYWINWVKQRPGQGLEWIGNIYPS | 144 | 400 |
| DSYTNYNQKFKDKATLTVDKSSSTAYMQLSSPTSEDSAVYYCTRGNYIDYWGQGT | | |
| TLTVSS | | |
| QVQLQQPGAELVRPGASVKLSCKASGYTFTDYWINWVKQRPGQGLEWIGNIYPS | 145 | 401 |
| DSYTNYNQKFKDKATLTVDKSSSTAYMQLSSPTSEDSAVYYCTRGNYIDYWGQGT | | |
| TLTVSS | | |
| QVQLQQSGPELVKPGASVKMSCKASGYTFTDYVISWVKQRTGQGLEWIGEIYPGS | 146 | 402 |
| GSSYYNEKFKGKATLTADKSSNTAYMQLSSLTSEDSAVYFCARPGDLGFAYWGQG | | |
| TLVTVSA | | |
| QVQLQQSGPELVKPGASVKMSCKASGYTFTDYVISWVKQRTGQGLEWIGEIYPGS | 147 | 403 |
| GSNYYNEKFKGKAIMTADKSSNTAYMQLSSLTSEDSAVYFCARPGDLGFAYWGQ | | |
| GTLVTVSA | | |
| QVQLQQSGPELVKPGASVKMSCKASGYTFTDYVISWVKQRTGQGLEWIGEIYPGS | 148 | 404 |
| GSSYYNEKFKGKATLTADKSSNTAYMQLSSLTSEDSAVYFCARPGDLGFAYWGQG | | |
| TLVTVSA | | |
| QVQLKESGPGLVAPSQSLSITCTVSGFSLTNYGVHWVRQPPGKGLEWLGVVWAG | 149 | 405 |
| GITNYNWALMSRLSISKDNSKSQVFLKMNSLQTDDTAMYYCARGDGYDDGYAM | | |
| DYWGQGTSVTVSS | | |
| QVQLKESGPGLVAPSQSLSITCTVSGFSLTSYGVHWVRQPPGKGLEWLGVLWAG | 150 | 406 |
| GITNYNSALMSRLSIRKDNSKSQVFLKMYSLHTDDTAMYYCARGDGYDDGYAMD | | |
| YWGQGTSVTVSS | | |
| QVQLQQSGPQLVSPGASVKISCKASGYSFTSYWMYWVKQRPGQGLEWIGMIDP | 151 | 407 |
| SDSETRLNQKFKDRATLTVDKSSSTAYMQLSSPTSEDSAVYYCARTRNYWGQGTTL | | |
| TVSS | | |
| QVQLQQSGPQLVSPGASVKISCKASGYSFTSYWMYWVKQRPGQGLEWIGMIDP | 152 | 408 |
| SDSETRLNQKFKDKATLTVDKSSSTAYMQLSSPTSEDSAVYYCARTRNYWGQGTTL | | |
| TVSS | | |
| QVQLQQSGPQLVSPGASVKISCKASGYSFTSYWMYWVKQRPGQGLEWIGMIDP | 153 | 409 |
| SDSETRLNQKFKDKATLTVDKSSSTAYMQLSSPTSEDSAVYYCARTRNYWGQGTSL | | |
| TVSS | | |
| EVQLQQSGAELVRSGASVKLSCTASGFNIKDYYMHWVKQRPEQGLEWIGWIDPE | 154 | 410 |
| NGDTEYAPKFQGKATMTADTSSNTAYLQLSSLTSEDTAVYYCNAPLLRYSSAMDY | | |
| WGQGTSVTVSS | | |
| EVQLQQSGAELVRSGASVKLSCTASGFNIKDYYIHWVKQRPEQGLEWIGWIDPEN | 155 | 411 |
| GDTEYAPKFQGKATMTADTSSNTAYLQLSSLTSEDTAVYYCNAPLLRYSSSMDYW | | |
| GQGTSVTVSS | | |
| EVQLQQSGAELVRSGASVKLSCTASGFNIKDYYMHWVKQRPEQGLEWIGWIDPE | 156 | 412 |
| NGDTEYAPKFQGKATMTADTSSNTAYLQLSSLTSEDTAVYYCNVALLRYSSAMDY | | |
| WGQGTSVTVSS | | |
| QVQLQQSGAELVKPGASVKLSCKASGYTFSNYYVYWVKQRPGQGLEWIGEINPS | 157 | 413 |
| NGDTNFNEKFKSKATLTVDKSSSTAYMQLSSLTSEDSAVYFCTSYYTHEAYYYAMD | | |
| CWGQGTSVTVSS | | |
| QVQLQQSGAELVRPGASVKLSCTASGFNIKDYYMHWVKQRPEQGLEWIGRIDPE | 158 | 414 |
| DGDTEYAPKFQGKATMTADTSSNTAYLQLSSLTSEDTAVYYCTPYSIYDAMDYWG | | |
| QGTSVTVSS | | |
| QVQLQQSGPELVKPGASVKMSCKASGYTFTDYVISWVKQRTGQGLEWIGEIYPGS | 159 | 415 |
| GSTYYNEKFKGKATLTADKSSNTAYMQLSSLTSEDSAVYFCARRGERGPWFAYWG | | |
| QGTLVTVSA | | |
| QVQLQQSGAELVRPGVSVKISCKGSGYSFTDYGMHWVKQSHAKSLEWIGVISTYY | 160 | 416 |
| GDASYNQKFKGKATMTVDKSSSTAYMELARLTSEDSAIYYCARQMDYDYTYYYA | | |
| MDYWGQGTSVTVSS | | |
| QVQLQQSGPELVKPGASVKMSCKASGYTFTDYVISWVKQRTGQGLEWNGEIYPG | 161 | 417 |
| SGSTYYNEKFKGKATLTADKSSNTAYMQLSSLTSEDSAVYFCARMDGPWFAYWG | | |
| QGTLVTVSA | | |
| QVTLKVSGPGILQPSQTLGLACTFSGISLSTSGMGLSWLRQPSGKALEWLASIWNN | 162 | 418 |
| DNYYNPSLKSRLTISKETSNNQVFLKLTSVDTADSTTYYCAWRPYYRYDSFAYWGQ | | |
| GTLVTVSA | | |
| QVQLQQSGAELVRPGASVTLSCKASGYTFTDYEMHWVKQTPVHGLEWIGAIDPE | 163 | 419 |
| TGGTAYNQKFKVKAILTADKSSSTAYMELRSLTSEDSAVYYCTRLGDYDVMDYWG | | |
| QGTSVTVSS | | |
| QVQLQQPGAELVMPGASVKLSCKASGYTFTSYWMHWVKQRPGQGLEWIGEIDP | 164 | 420 |
| SDSYTNYNQKFKGKSTLTVDKSSSTAYMQLSSLTSEDSAVYYCARAGRYGSSFDYW | | |
| GQGTTLTVSS | | |
| QVTLKESGPGILQPSQTLSLTCSFSGFSLSTSGMGVSWIRQPSGKGLEWLAHIYWD | 165 | 421 |
| DDKRYNPSLKSRLTISKDTSRNQGFLKITSVDTADTATYYCAGRPDDYDGAWFPY | | |
| WGQGTLVTVSA | | |
| QVQLQQSGPELVKPGASVKMSCKASGYTFTDYVISWVKQRTGQGLEWIGEIYPGS | 166 | 422 |
| GSNYYNEKFKGKATLTADKSSNTAYMQLSSLTSEDSAVYFCAREEKIYFDYWGQGT | | |
| TLTVSS | | |
| QVQLQQPGAELVKPGASVKLSCKASGYTFTSYWMHWVKQRPGQGLEWIGMIHP | 167 | 423 |
| NSGSTNYNEKFKSKATLTVDKSSSTAYMQLSSLTSEDSAVYYCARYDGYWFDYWG | | |
| QGTTLTVSS | | |
| EVQLQQSGTVLARPGASVKMSCKTSGYTFTSYWMHWIKQRPGQGLEWIGAIYP | 168 | 424 |
| GNSDTTYNQKFKGKAKLTAVTSASTAYMELSSLTNEDSAVYYCTSLITTAYYFDYW | | |
| GQGTTLTVSS | | |
| QVQLQQPGAELVKPGASVKLSCKASGYTFTSYWMHWVKQRPGQGLEWIGMIHP | 169 | 425 |
| NSGSTNYNEKFKSKATLTVDKSSSTAYMQLSSLTSEDSAVYYCAPETGDYGSSYVW | | |
| YFDVWGTGTTVTVSS | | |
| QVQLQQSGPELVKPGASVKMSCKASGYTFTDYVISWVKQRTGQGLEWIGEIYPGS | 170 | 426 |
| GSTYYNEKFKGKATLTADKSSNTAYMQLSSLTSEDSAVYFCARGKVTRFAYWGQG | | |
| TLVTVSA | | |
| EVQLVESGGGLVKPGGSLKLSCAASGFTFSSYAMSWVRQTPEKRLEWVATISDGG | 171 | 427 |
| SYTYYPDNVKGRFTISRDNAKNNLYLQMSHLKSEDTAMYYCARDQDSNWEYFDY | | |
| WGQGTSLTVSS | | |
| QIQLVQSGPELKKPGETVKISCKASGYTFTDYSMHWVRQAPGKGLKWMAWINTE | 172 | 428 |
| TGEPTYADDFKGRFAFSLETSASTAYLQINNLKNEDTATYFCARESWDRAMDYWG | | |
| QGTSVTVSS | | |
| QVQLQQSGPQLVSPGASVKISCKASGYSFTNYWMHWVKQRPGQGLEWIGMIDP | 173 | 429 |
| SDSETRLNQQFKDKATLTVDESSSTAYMQLSSPTSEDSAVYYCAIPYYAMDYWGQ | | |
| GTSVTVSS | | |
| QVQLQQPGSVLVRPGASVKLSCKASGYTFTSSWMHWAKQRPGQGLEWIGEIHP | 174 | 430 |
| NSGNTNYNEKNKGKATLTVDTSSSTAYVDLSSLTSEDSAVYYCATYYGNYVWYFDV | | |
| WGAGTSVTVSS | | |
| QVQLQQPGAELVKPGASVKLSCKASGYTFTSYWMHWVKQRPGQGLEWIGMIHP | 175 | 431 |
| NSGSTNYNEKFKSKATLTVDKSSSTAYMQLSSLTSEDSAVYYCASYGSSYWYFDVW | | |
| GTGTTVTVSS | | |
| QVQLQQPGAELVKPGASVKMSCKASGYTFTSYNMHWVKQTPGQGLEWIGALYS | 176 | 432 |
| GNGDTSYNQKFKGKATLTADKSSSTAYMQLSSLTSEDSAVYYCARDYYGSSHLWY | | |
| FDVWGAGTTVTVSS | | |
| QVTLKESGPGILQPSQTLSLTCSFSGFSLSTSGMGVSWIRQPSGKGLEWLAHIYWD | 177 | 433 |
| DDKRYNPSLKSRLTISKDTSRNQVFLKITSVDTADTATYYCARRAHYDYGWYFDVW | | |
| GAGTTVTVSS | | |
| QVQLQQPGAELVKPGASVKLSCKASGYTFTSYWMHWVKQRPGQGLEWIGMIHP | 178 | 434 |
| NSGSTNYNEKFKSKATLTVDKSSSTAYMQLSSLTSEDSAVYYCAGYDYDWYFDVW | | |
| GTGTTVTVSS | | |
| QVKLVESGGDLVKPGGSLKLSCAASGFTFSSYGMSWVRQTPDKRLEWVATISSGG | 179 | 435 |
| SYTYYPDSVKGRFTISRDNAKNTLYLQMSSLKSEDTAMYYCARHEDSNYHYFDYW | | |
| GQGTTLTVFS | | |
| QVKLVESGGDLVKPGGSLKLSCAASGFTFSSYGMSWVRQTPDKRLEWVATISSGG | 180 | 436 |
| SYTYYPDSVKGRFTISRDNAKNTLYLQMSSLKSEDTAMYYCARQNDSSWAWFAY | | |
| WGQGTLVTVSA | | |
| QVQLQQPGAELVKPGASVKLSCKASGYTFTSYWMHWVKQRPGQGLEWIGMIHP | 181 | 437 |
| NSGSTNYNEKFKSKATLTVDKSSSTAYMQLSSLTSEDSAVYYCALPYSNYGWYFDV | | |
| WGTGTTVTVSS | | |
| QVQLQQPGAELVRPGSSVKLSCKASGYTFTSYWMHWVKQRPIQGLEWIGNIDPS | 182 | 438 |
| DSETHYNQKFKDKATLTVDKSSSTAYMQLSSLTSEDSAVYYCARDYYGSYWYFDV | | |
| WGTGTTVTVSS | | |
| EVQLQQSGAELVKPGASVKLSCTASGFNIKDYYMHWVKQRTEQGLEWIGRIDPE | 183 | 439 |
| DGETKYAPKFQGKATITADTSSNTAYLQLSSLTSEDTAVYYCAAYGNSAWFAYWG | | |
| QGTLVTVSA | | |
| QVQLKESGPGLVAPSQSLSITCTVSGFSLTSYGVHWVRQPPGKGLEWLGVIWAGG | 184 | 440 |
| STNYNSALMSRLSISKDNSKSQVFLKMNSLQTDDTAMYYCAREGGYTGYFDVWG | | |
| AGTTVTVSS | | |
| QVQLQQPGAELVRPGSSVKLSCKASGYTFTSYWMHWVKQRPIQGLEWIGNIDPS | 185 | 441 |
| DSETHYNQKFKDKATLTVDKSSSTAYMQLSSLTSEDSAVYYCAYSNYVPYYAMDY | | |
| WGQGTSVTVSS | | |
| QVQLQQSGPELVKPGASVKMSCKASGYTFTDYVISWVKQRTGQGLEWIGEIYPGS | 186 | 442 |
| GSAYYNEKFKGKATLTADKSSNTAYMQLSSLTSEDSAVYFCARRGFDYWGQGTTL | | |
| TVSS | | |
| QVQLQQPGAELVKPGASVKLSCKASGYTFTSYWMHWVKQRPGQGLEWIGMIHP | 187 | 443 |
| NSGSTNYNEKFKSKATLTVDKSSSTAYMQLSSLTSEDSAVYYCARDYYGSGYGYYFD | | |
| YWGQGTTLTVSS | | |
| QVQLQQPGAELVKPGASVKLSCKASGYTFTSYWMHWVKQRPGQGLEWIGMIHP | 188 | 444 |
| NSGSTNYNEKFKSKATLTVDKSSSTAYMQLSSLTSEDSAVYYCARDYYGSSYGWYF | | |
| DVWGTGTTVTVSS | | |
| QVQLQQPGAELVKPGASVKLSCKASGYTFTSYWMHWVKQRPGQGLEWIGMIHP | 189 | 445 |
| NSGSTNYNEKFKSKATLTVDKSSSTAYMQLSSLTSEDSAVYYCARDYYGSSYGWYF | | |
| DVWGTGTTVTVSS | | |
| QVQLQQPGAELVKPGASVKLSCKASGYTFTSYWMHWVKQRPGQGLEWIGMIHP | 190 | 446 |
| NSGSTNYNEKFKSKATLTVDKSSSTAYMQLSSLTSEDSAVYYCASDYYGSSYGWYF | | |
| DVWGTGTTVTVSS | | |
| QVQLQQPGAELVKPGASVKLSCKASGYTFTSYWMHWVKQRPGQGLEWIGMIHP | 191 | 447 |
| NSGSTNYNEKFKSKATLTVDKSSSTAYMQLSSLTSEDSAVYYCARDYYGSSYGWYF | | |
| DVWGTGTTVTVSS | | |
| QVQLQQPGAELVKPGASVKLSCKASGYTFTSYWMHWVKQRPGQGLEWIGMIHP | 192 | 448 |
| NSGSTNYNEKFKSKATLTVDKSSSTAYMQLSSLTSEDSAVYYCTRDYYGSGYGWYF | | |
| DVWGTGTTVTVSS | | |
| QVQLQQPGAELVRPGASVKLSCKASGYTFTNYWMNWVKQRPGQGLEWIGMID | 193 | 449 |
| PSDSETHYNQMFKDKATLTVDKSSSTAYMQLSSLTSEDSAVYYCATYDGYYRFAY | | |
| WGQGTLVTVSA | | |
| QVQLQQPGAELVRPGASVKLSCKASGYTFTNYWMNWVKQRPGQGLEWIGMID | 194 | 450 |
| PSDSETHFNQMFKDKATLTVDKSSSTAYMQLSSLTSEDSAVYYCATYDVYYRFAY | | |
| WGQGTLVTVSA | | |
| QVQLQQPGAELVKPGASVKLSCKASGYTFTSYWMHWVKQRPGQGLEWIGMIHP | 195 | 451 |
| NSGSTNYNEKFKSKATLTVDKSSSTAYMQLSSLTSEDSAVYYCARDYGNYDYAMD | | |
| YWGQGTSVTVSS | | |
| QVQLQQPGAELVKPGASVKLSCKASGYTFTSYWMHWVKQRPGQGLEWIGMIHP | 196 | 452 |
| NSGSTNYNEKFKSKATLTVDKSSSTAYMQLSSLTSEDSAVYYCARDYGNYDYAMD | | |
| YWGQGTSVTVSS | | |
| EVKLVESGGDLVKPGGSLKLSCAASGFTFSSYGMSWVRQTPDKRLEWVATISSGG | 197 | 453 |
| SYTYYPDSVKGRFTISRDNAKNTLYLQMSSLKSEDTAMYYCASQLTGTWYYFDYW | | |
| GQGTTLTVSS | | |
| QVKLVESGGDLVKPGGSLKLSCAASGFTFSSYGMSWVRQTPDKRLEWVATISSGG | 198 | 454 |
| SYTYYPDSVKGRFTISRDNAKNTLYLQMSSLKSEDTAMYYCASQLTGTWYYFDYW | | |
| GQGTTLTVSS | | |
| QVKLVESGGDLVKPGGSLKLSCAASGFTFSSYGMSWVRQTPDKRLEWVATISSGG | 199 | 455 |
| SYTYYPDSVKGRFTISRDNAKNTLYLQMSSLKSEDTAMYYCASQLTGTWYYFDYW | | |
| GQGTTLTVSS | | |
| DVKLVESGGGLVKLGGSLKLSCAASGFTFSNYYMSWVRQTPEKRLELVAVINSNG | 200 | 456 |
| GSTYYPDTVKGRFTISRDNAKNTLYLQMSSLKSEDTALYYCARQEGIGYAMDYWG | | |
| QGTSVTVSS | | |
| EVQLQQSGPELVKPGASVKISCKTSGYTFTEYTMHWVKQSHGKSLEWIGGIYPNN | 201 | 457 |
| GGTSYNQKFKGKATLTVDKSSSTAYMELRSLTSEDSAVYYCARGGWLLGYWGQG | | |
| TTLTVSS | | |
| QVQLKQSGPGLVQPSQSLSITCTVSGFSLTSYGVHWVRQSPGKGLEWLGVIWSG | 202 | 458 |
| GSTDYNAAFISRLSISKDNSKSQVFFKMNSLQADDTAIYYCARDGGIRGAMDYWG | | |
| QGTSVTVSS | | |
| QVQLQQSGAELMKPGASVKISCKATGYTFSSYWIEWVKQRPGHGLEWIGEILPGS | 203 | 45 |
| GSTNYNEKFKGKATFTADTSSNTAYMQLSSLTSEDSAVYYCARRGYGYDEGFDYW | | |
| GQGTTLTVSS | | |
| QVQLQQSGAELVRPGASVTLSCKASGYTFTDYEMHWVKQTPVHGLEWIGAIDPE | 204 | 460 |
| TGGTAYNQKFKGKATLTADKSSSTAYMELRSLTSEDSAVYYCTRNYDYAMDYWG | | |
| QGTSVTVSS | | |
| DVKLVESGGGLVKLGGSLKLSCAASGFTFSSYYMSWVRQTPEKRLELVAVINSNGG | 205 | 461 |
| STFYPDTVKGRFTISRDNAKNTLYLQMSSLKSEDTALYYCARQEGIGYALDYWGQG | | |
| TSVTVSS | | |
| EVKLVESGGDLVKPGGSLKLSCAASGFTFSSYAMSWVRQTPEKRLEWVAAISSGGS | 206 | 462 |
| TYYPDSVKGRFTISRDNARNILYLQMSSLRSEDTAMYYCAREREWGVYYGSSLDY | | |
| WGQGTTLTVSS | | |
| EVQLQQSGAELVKPGASVKLSCTASGFNIKDTYMHWVKQRPEQGLEWIGRIDPA | 207 | 463 |
| NGNTKYDPKFQGKATITADTSSNTAYLQLSSLTSEDTAVYYCARSDGNYDWGQGT | | |
| LVTVSA | | |
| DVKLVESGGGLVKLGGSLKLSCAASGFTFSNYYMSWVRQTPEKRLELVAVINSNG | 208 | 464 |
| GSTYYPDTVKGRFTISRDNAKNILYLQMSSLKSEDTALYYCARQEGIGYGMDYWG | | |
| QGTSVTVSS | | |
| EVQLVESGGGLVQPKGSLKLSCAASGFTFNTYVMNWVRQAPGKGLEWVARIRSK | 209 | 465 |
| SDNYATYYADSVKDIFTISRDDSQSMLYLQMNNLKTEDTAMYYCVRHDGVVGFD | | |
| VWGAGTTVTVSS | | |
| DVQLQESGPGLVKPSQSLSLTCSVTGYSITSGYYWNWIRQFPGNKLEWMGYISYD | 210 | 466 |
| GSNNYNPSLKNRISITRDTSKNQFFLKLNSVTTEDTATYYCARGGGRGWGQGTLVT | | |
| VSA | | |
| QIQLVQSGPELKKPGETVKISCKASGYTFTDYSMHWVKQAPGKGLKWMGWINTE | 211 | 467 |
| TGEPTYADDFKGRFAFSLETSASTAYLQINNLKNEDTATYFCARDYYDYYYAMDYW | | |
| GQGTSVTVSS | | |
| QIQLVQSGPELKKPGETVKISCKASGYTFTDYSMHWVKQAPGKGLKWMGWINTE | 212 | 468 |
| TGEPTYADDFKGRFAFSLETSASTAYLQINNLKNEDTATYFCARESWDRAMDYWG | | |
| QGTSVTVSS | | |
| QVQLQQPGAELVRPGASVKLSCKASGYTFTNYWMNWVKQRPEQGLEWIGRIDP | 213 | 469 |
| YDSETHYNQKFKDKAILTVDKSSSTAYMQLSSLTSEDSAVYYCARIYSDYDGAWFAY | | |
| WGQGTLVTVSA | | |
| EVQLQQSGPELVKPGASVKMSCKASGYTFTDYYMDWVKQSHGESFEWIGRVNP | 214 | 470 |
| YNGGTSYNQKFKGKATLTVDKSSSTAYMELNSLTSEDSAVYYCARGTVGFAYWGQ | | |
| GTLVTVSA | | |
| EVKLVESGGGLVKPGGSLKLSCAASGFTFSSYAMSWVRQTPEKRLEWVASISSGGS | 215 | 471 |
| TYYPDSVKGRFTISRDNARNILSLQMSSLRSEDTAMYYCAREREWGVFYGSSLDY | | |
| WGQGTTLTVSS | | |
| EVMLVESGGGLVKPGGSLKLSCAASGFTFSSYAMSWIRQTPEKRLEWVATISSGGS | 216 | 472 |
| YTYYPDSVKGRFTISRDNAKNTLYLQMSSLRSEDTAMYYCARHDDSSYGYFDYWG | | |
| QGTTLTVSS | | |
| EVKLVESGGGLVKPGGSLKLSCAASGFTFSNYAMSWVRQTPEKRLEWVASISSGG | 217 | 473 |
| TTYYPDSVKGRFTISRDNARNILYLQMSSLRSEDTAMYYCARTMPDVWGAGTTVT | | |
| VSS | | |
| QVQLKESGPGLVAPSQSLSITCTVSGFSLTSYGVHWVRQPPGKGLEWLGVIWAGG | 218 | 474 |
| STNYNSALMSRLSISKDNSKSQVFLKMNSLQTDDTAMYYCARDTDGYYWAMDY | | |
| WGQGTSVTVSS | | |
| DVQLQESGPGLVKPSQSLSLTCTVTGYSITSDHAWNWIRQFPGNKLEWMGYISYS | 219 | 475 |
| GSTTYNPSLKSRISITRDTSKNQFFLQLNSVTTEDTATYYCARKWGDYWGQGTSVT | | |
| VSS | | |
| QVQLQQSGAELVRPGASVTLSCKASGYTFTDYEMHWVKQTPVHGLEWIGAIDPE | 220 | 476 |
| TGGTAYNQKFKGKATLTADKSSSTAYMELRSLTSEDSAVYYCTRNYDYALDYWGQ | | |
| GTSVTVSS | | |
| DVQLQESGPGLVKPSQSLSLTCSVTGYSITSGYYWNWIRQFPGNKLEWMGYISYD | 221 | 477 |
| GSNDYNPSLKNRISITRDTSKNQFFLKLNSVTTEDTATYYCARGGGRGWGQGTLVT | | |
| VSA | | |
| DVKLVESGGGLVKLGGSLKLSCAASGFTFSNYYMSWVRQTPEKRLELVAVINSNG | 222 | 478 |
| GSTYYPDTVKGRFTISRDNAKNTLYLQMSSLKSEDTALYYCARQEEIGYAMDYWG | | |
| QGTSVTVSS | | |
| EVQLQQSGAELVRPGALVKLSCKASGFNIKDYFMHWVKQRPEQGLEWIGWIDPE | 223 | 479 |
| TDNTIYDPKFQGKASITADTSSNTAYLQLSSLTSEDTAVYYCARSGNMGFTYWGQ | | |
| GTLVTVSA | | |
| EVMLVESGGGLVKPGGSLKLSCAASGFTFSSYAMSWVRQTPEKRLEWVATISSGG | 224 | 480 |
| SYTYYPDSVKGRFTISRDNAKNTLYLQMSSLRSEDTAMYYCASQGGSSWGAMDY | | |
| WGQGTSVTVSS | | |
| EVMLVESGGGLVKPGGSLKLSCAASGFTFSSYAMSWVRQTPEKRLEWVATISNGG | 225 | 481 |
| SYTYYPDSVKGRFTISRDNAKNTLYLQMSSLRSEDTAMYYCARHEITTRFAYWGQG | | |
| TLVTVSA | | |
| VQLQESGPGLVKPSQSLSLTCSVTGYSITSGYYWNWIRQFPGNKLEWMGYMSYD | 226 | 482 |
| GSNNYNPSLKNRISITRDTSKNQFFLKLNSVTTEDTATYYCAREAGYFDYWGQGTT | | |
| LTVSS | | |
| EVQLVESGGGLVQPKGSLKLSCAASGFSFNTYAMNWVRQAPGKGLEWVARIRSK | 227 | 483 |
| SNNYATYYADSVKDRFTISRDDSESMLYLQMNNLKTEDTAMYYCVRQYGYDFDY | | |
| WGQGTTLTVSS | | |
| EVQLVESGGDLVKPGGSLKLSCAASGFTFSSYGMSWVRQTPDKRLEWVATISSGG | 228 | 484 |
| SYTYYPDSVKGRFTISRDNAKNTLYLQMSSLKSEDTAMYYCARHKGVNWDYFDY | | |
| WGQGTTLTVSS | | |
| QVQLQQSGAELVRPGASVTLSCKASGYTFTDYEMHWVKQTPVHGLEWIGAIDPE | 229 | 485 |
| TGGTAYNQKFKGKATLTADKSSSTAYMELRSLTSEDSAVYYCTRGDGNYDSWYFD | | |
| VWGAGTTVTVSS | | |
| EVMLVESGGGLVKPGGSLKLSCAASGFTFSSYAMSWVRQTPEKRLEWVATISSGG | 230 | 486 |
| SYTYYPDSVKGRFTISRDNAKNTLYLQMSSLRSEDTAMYYCARLPVTTVVFDYWG | | |
| QGTTLTVSS | | |
| EVQLVESGGGLVKPGGSLKLSCAASGFTFSSYAMSWVRQTPEKRLEWVATISSGG | 231 | 487 |
| SYTYYPDSVKGRFTISRDNAKNTLYLQMSSLRSEDTAMYYCARRPVVVPFDYWGQ | | |
| GTTLTVSS | | |
| QVQLKQSGPGLVQPSQSLSITCTVSGFSLTSYGVHWVRQSPGKGLEWLGVIWSG | 232 | 488 |
| GSTDYNAAFISRLSISKDNSKSQVFFKMNSLQADDTAIYYCARGWDADYFDYWGQ | | |
| GTTLTVSS | | |
| QVQLQQPGAELVKPGASVKLSCKASGYTFTNYWMHWVKQRPGQGLEWIGMIH | 233 | 489 |
| PNSGSTNYNEKFKSKATLTVDKSSSTAYMQLSSLTSEDSAVYYCTRYDYDDYWGQ | | |
| GTTLTVSS | | |
| EVQLQQSGPELVKPGASVKISCKASGYTFTDYYMNWVKQSHGKSLEWIGDINPN | 234 | 490 |
| NGGTSYNQKFKGKATLTVDKSSSTAYMDLRSLTSEDSAVYYCARSELGLYAMDYW | | |
| GQGTSVTVSS | | |
| QVQLQQSGAELMKPGASVKLSCKATGYTFTGYWIEWVKQRPGHGLEWIGEILPG | 235 | 491 |
| SGSTNYNEKFKGKATFTADTSSNTAYMQLSSLTTEDSAIYYCARGRIHYFDYWGQG | | |
| TTLTVSS | | |
| QVQLQQSGAELMKPGASVKLSCKATGYTFTGYWIEWVKQRPGHGLEWIGEILPG | 236 | 492 |
| SGSTNYNEKFKGKATFTADTSSNTAYMQLSSLTTEDSAIYYCARGRIHYFDYWGQG | | |
| TTLTVSS | | |
| QVQLKQSGPGLVQPSQSLSITCTVSGFSLTSYGVHWVRQSPGKGLEWLGVIWSG | 237 | 493 |
| GSTDYNAAFISRLSISKDNSKSQVFFKMNSLQADDTAIYYCARKGYGYDWYFDVW | | |
| GTGTTVTVSS | | |
| QVQLQQPGAELVMPGASVKLSCKASGYTFTSYWMHWVKQRPGQGLEWIGEIDP | 238 | 494 |
| SDSYTNYNQKFKGKATLTVDKSSSTAYMQLSSLTSEDSAVYYCARSSYYYYAMDYW | | |
| GQGTSVTVSS | | |
| DVQLQESGPGLVKPSQSLSLTCSVTGYSITSGYYWNWIRQFPGNKLEWMGYISYD | 239 | 495 |
| GSNNYNPSLKNRISITRDTSKNQFFLKLNSVTTEDTATYYCARGGGRDWGQGTTLT | | |
| VSS | | |
| QVQLKQSGPGLVQPSQSLSITCTVSGFSLTSYGVHWVRQSPGKGLEWLGVIWSG | 240 | 496 |
| GSTDYNAAFISRLSISKDNSKSQVFFKMNSLQADDTAIYYCARGGDYDSYAMDYW | | |
| GQGTSVTVSS | | |
| QVQLQQPGAELVKPGASVKMSCKASGYTFTSYWITWVKQRPGQGLEWIGDIYPG | 241 | 497 |
| SGSTNYNEKFKSKATLTVDTSSSTAYMQLSSLTSEDSAVYYCARESVYDGYSWYFD | | |
| VWGTGTTVTVSS | | |
| EFQLQQSGPELVKPGASVKISCKASGYSFTDYNMNWVKQSNGKSLEWIGVINPNY | 242 | 498 |
| GTTSYNQKFKGKATLTVDQSSSTAYMQLNSLTSEDSAVYYCASTYDYDDWYFDV | | |
| WGTGTTVTVSS | | |
| QVQLQQPGAELVMPGASVKLSCKASGYTFTSYWMHWVKQRPGQGLEWIGEIDP | 243 | 499 |
| SDSYTNYNQKFKGKATLTVDKSSSTAYMQLSSLTSEDSAVYYCARSGNYLYAMDY | | |
| WGQGTSVTVSS | | |
| EFQLQQSGPELVKPGASVKISCKASGYSFTDYNMNWVKQSNGKSLEWIGVINPNY | 244 | 500 |
| GTTSYNQKFKGKATLTVDQSSSTAYMQLNSLTSEDSAVYYCAREGTSWYFDVWG | | |
| TGTTVTVSS | | |
| QVQLKQSGPGLVQPSQSLSITCTVSGFSLTSYGVHWVRQSPGKGLEWLGVIWRG | 245 | 501 |
| GSTDYNAAFMSRLSITKDNSKSQVFFKMNSLQADDTAIYYCAKKGDGYDWYFDV | | |
| WGTGTTVTVSS | | |
| QVQLKQSGPGLVQPSQSLSITCTVSGFSLTSYGVHWVRQSPGKGLEWLGVIWSG | 246 | 502 |
| GSTDYNAAFISRLSISKDNSKSQVFFKMNSLQADDTAIYYCAREGNYGSSYDAMDY | | |
| WGQGTSVTVSS | | |
| QVQLQQPGAELVMPGASVKLSCKASGYTFTSYWMHWVKQRPGQGLEWIGEIDP | 247 | 503 |
| SDSYTNYNQKFKGKATLTVDKSSSTAYMQLSSLTSEDSAVYYCARSSNYPYAMDY | | |
| WGQGTSVTVSS | | |
| EVQLQQSVAELVRPGASVKLSCTASGFNIKNTYMHWVKQRPEQGLEWIGRIDPA | 248 | 504 |
| NGNTKYAPKFQGKATITADTSSNTAYLQLSSLTSEDTAIYYCAYYSGLYWGQGTLVT | | |
| VSA | | |
| QVQLQQPGAELVRPGSSVKLSCKASGYTFTSYWMHWVKQRPIQGLEWIGNIDPS | 249 | 505 |
| DSETHYNQKFKDKATLTVDKSSSTAYMQLSSLTSEDSAVYYCARRGQIYYGYSWFA | | |
| YWGQGTLVTVSA | | |
| EVQLQQSGPELVKPGASVKISCKASGYTFTDYYMNWVKQSHGKSLEWIGDINPN | 250 | 506 |
| NGGTSYNQKFKGKATLTVDKSSSTAYMELRSLTSEDSAVYYCARSTVVADWYFDV | | |
| WGTGTTVTVSS | | |
| QVQLQQSGAELARPGASVKLSCKASGYTFTSYGISWVKQRTGQGLEWIGEIYPRS | 251 | 507 |
| GNTYYNEKFKGKATLTADKSSSTAYMELRSLTSEDSAVYFCARSGSSYGYFDVWGT | | |
| GTTVTVSS | | |
| QVQLKQSGPGLVQPSQSLSITCTVSGFSLTSYGVHWVRQSPGKGLEWLGVIWSG | 252 | 508 |
| GSTDYNAAFISRLSISKDNSKSQVFFKMNSLQADDTAIYYCARKGGYDAYAMDYW | | |
| GQGTSVTVSS | | |
| EFQLQQSGPELVKPGASVKISCKASGYSFTDYNMNWVKQSNGKSLEWIGVINPNY | 253 | 509 |
| GTTSYNQKFKGKATLTVDQSSSTAYMQLNSLTSEDSAVYYCAREGFITTVVAVDY | | |
| WGQGTTLTVSS | | |
| QVQLQQSGAELVRPGASVTLSCKASGYTFTDYEMHWVKQTPVHGLEWIGAIDPE | 254 | 510 |
| TGGTAYNQKFKGKAILTADKSSSTAYMELRSLTSEDSAVYYCTREGNYDAMDYWG | | |
| QGTSVTVSS | | |
| QVQLQQPGAELVRPGTSVKLSCKASGYTFTSYWMHWVKQRPGQGLEWIGVIDP | 255 | 511 |
| SDSYTNYNQKFKGKATLTVDTSSSTAYMQLSSLTSEDSAVYYCARWDYYGVDYWG | | |
| QGTTLTVSS | | |
| EVQLVESGGGLVQSGGSLRLSCAASGFTFSGYWMYWVRQAPGKGLEWVSAISPG | 256 | 256 |
| GGSTYYPDSVKGRFTISRDNAKNTLYLQMNSLEPEDTALYYCASSLTATHTYEYDY | | |
| WGQGTQVTVSS | | |
| QVQLVQSGAEVKKPGASVKVSCKASGGTFSSYAISWVRQAPGQCLEWMGWINP | 257 | 9447 |
| NSGGTNYAQKFQGRVTMTRDTSTSTVYMELSSLRSEDTAVYYCARDGYSGSYSD | | |
| WGQGTLVTVSS | | |
| QVQLVQSGAEVKKPGSSVKVSCKASGYTFTSYDINWVRQAPGQCLEWMGGIIPLS | 258 | 9448 |
| GAPNYAHKFQGRVTITADESTSTAYMELSSLRSEDTAVYYCARGALYNWNDGWF | | |
| DPWGQGTLVTVSS | | |
| QVQLVQSGAEVKKPGASVKVSCKASGYSLITHWMHWVRQAPGQCLEWMGMIN | 259 | 9449 |
| PSDGVTYYAQTFQGRVTMTRDTSTSTVYMELSSLRSEDTAVYYCAREYYGEGFDY | | |
| WGQGTLVTVSS | | |
| QVQLVQSGAEVKKPGSSVKVSCKASGYTFSDHHVHWVRQAPGQGLEWMGGIIPI | 260 | 9450 |
| FGTANYAQKFQGRVTITADESTSTAYMELSSLRSEDTAVYYCARGSSWYLHFQHW | | |
| GQGTLVTVSS | | |
| QVQLVQSGAEVKKPGASVKVSCKASGGTFSRYGIAWVRQAPGQGLEWMGISYPS | 261 | 9451 |
| DGSTSSAQKLQGRVTMTRDTSTSTVYMELSSLRSEDTAVYYCARDRLGDLDYWG | | |
| QGTLVTVSS | | |
| QVQLVQSGAEVKKPGSSVKVSCKASGYTFTDYYVHWVRQAPGQGLEWVGWIST | 262 | 9452 |
| FTGNTDYAQNFQGRVTITADESTSTAYMELSSLRSEDTAVYYCARDAPLAAAGTDY | | |
| YYGMDVWGQGTTVTVSS | | |
| QVQLVQSGAEVKKPGASVKVSCKASGGTFSSYALSWVRQAPGQGLEWMGIINPS | 263 | 9453 |
| GGTNYAQKFQGRVTMTRDTSTSTVYMELSSLRSEDTAVYYCARDLGDPGMDVW | | |
| GQGTLVTVSS | | |
| QVQLVQSGAEVKKPGASVKVSCKASGGTFSSYAISWVRQAPGQGLEWMGWINP | 264 | 9454 |
| NSGGTNYAQKFQGRVTMTRDTSTSTVYMELSSLRSEDTAVYYCARDGYSGSYSD | | |
| WGQGTLVTVSS | | |
| QVQLVQSGAEVKKPGASVKVSCKASGGTFSSYALSWVRQAPGQGLEWMGIINPS | 265 | 9455 |
| GGTNYAQKFQGRVTMTRDTSTSTVYMELSSLRSEDTAVYYCARDLGDPGMDVW | | |
| GQGTLVTVSS | | |
| QVQLVQSGAEVKKPGASVKVSCKASGGTFSNYAISWVRQAPGQGLEWMGIIDPS | 266 | 9456 |
| GGSTTYAQKFQGRVTMTRDTSTSTVYMELSSLRSEDTAVYYCARDLGDMGMDV | | |
| WGQGTTVTVSS | | |
| QVQLVQSGAEVKKPGASVKVSCKASGGTFSNYAFSWVRQAPGQGLEWMGIINP | 267 | 9457 |
| SGGSTSYAQKFQGRVTMTRDTSTSTVYMELSSLRSEDTAVYYCARDVGDRGMDV | | |
| WGQGTTVTVSS | | |
| QVQLVQSGAEVKKPGASVKVSCKASGSTFSGYYMHWVRQAPGQGLEWMGWID | 268 | 9458 |
| PNGGGTQYAQKFQGRVTMTRDTSTSTVYMELSSLRSEDTAVYYCAKDIVHDGTEY | | |
| FQHWGQGTLVTVSS | | |
| QVQLVQSGAEVKKPGASVKVSCKASGYTFTSYYMHWVRQAPGQGLEWMGIINP | 269 | 9459 |
| SGGSTSYAQKFQGRVTMTRDTSTSTVYMELSSLRSEDTAVYYCAKDIVHDGTEYFQ | | |
| HWGQGTLVTVSS | | |
| QVQLVQSGAEVKKPGASVKVSCKASGGTFSSYAISWVRQAPGQGLEWMGIINPS | 270 | 9460 |
| GGSTNYAQKFQGRVTMTRDTSTSTVYMELSSLRSEDTAVYYCAREGRDHDAFDI | | |
| WGQGTMVTVSS | | |
| QVQLVQSGAEVKKPGASVKVSCKASGFTFTDYGISWVRQAPGQGLEWMGIINPS | 271 | 9461 |
| GGSTSYAQKFQGRVTMTRDTSTSTVYMELSSLRSEDTAVYYCAREGRSHDAFDIW | | |
| GQGTMVTVSS | | |
| QVQLVQSGAEVKKPGASVKVSCKASGYTFTGYYMHWVRQAPGQGLEWMGWM | 272 | 9462 |
| NPHSGDTGYAQKFQGRVTMTRDTSTSTVYMELSSLRSEDTAVYYCARWVGTTEY | | |
| YYYYYMDVWGKGTTVTVSS | | |
| QVQLVQSGAEVKKPGASVKVSCKASGYTFTDYYLHWVRQAPGQGLEWMGIIDPS | 273 | 9463 |
| GGSTSIAQKFQGRVTMTRDTSTSTVYMELSSLRSEDTAVYYCATTAYYDFWSGYS | | |
| MDVWGKGTTVTVSS | | |
| QVQLVQSGAEVKKPGASVKVSCKASGYTFTSHYMHWVRQAPGQGLEWMGIIDP | 274 | 9464 |
| SGGSTSYAQEFQGRVTMTRDTSTSTVYMELSSLRSEDTAVYYCARDMDNWNTGY | | |
| YYYMDVWGKGTTVTVSS | | |
| QVQLVQSGAEVKKPGASVKVSCKASGGTFSSYAINWVRQAPGQGLEWMGWVN | 275 | 9465 |
| PNSGDTAYAQKFQGRVTMTRDTSTSTVYMELSSLRSEDTAVYYCARDQRGGDA | | |
| WDVWGKGTTVTVSS | | |
| QVQLVQSGAEVKKPGSSVKVSCKASGGTFSNYAISWVRQAPGQGLEWMGIITPS | 276 | 9466 |
| GGSTTYAHKFQGRVTITADESTSTAYMELSSLRSEDTAVYYCARDTAGHFDIWGQ | | |
| GTLVTVSS | | |
| QVQLVQSGAEVKKPGASVKVSCKASGGTFRNDVINWVRQAPGQGLEWIGWMN | 277 | 9467 |
| PNSGNTGYAQKFQGRVTMTRDTSTSTVYMELSSLRSEDTAVYYCARDNPDLDGM | | |
| DVWGQGTLVTVSS | | |
| QVQLVQSGAEVKKPGASVKVSCKASGGTFSSYAINWVRQAPGQGLEWLGWISAY | 278 | 9468 |
| NGNTNYAQKFQGRVTMTRDTSTSTVYMELSSLRSEDTAVYYCARDLVGHFDYWG | | |
| QGTLVTVSS | | |
| QVQLVQSGAEVKKPGASVKVSCKASGGTFSSYAISWVRQAPGQGLEWMGWINP | 279 | 9469 |
| NSGGTNYAQKFQGRVTMTRDTSTSTVYMELSSLRSEDTAVYYCARDGYSGSYSD | | |
| WGQGTLVTVSS | | |
| QVQLVQSGAEVKKPGASVKVSCKASGNTLSSHAISWVRQAPGQGLEWMGIINPS | 280 | 9470 |
| GGSTSYAQKFQGRVTMTRDTSTSTVYMELSSLRSEDTAVYYCARDQGSSGTFDYW | | |
| GQGTLVTVSS | | |
| QVQLVQSGAEVKKPGASVKVSCKASGGTLSSYAISWVRQAPGQGLEWMGWINP | 281 | 9471 |
| NSGGTNYAQKFQGRVTMTRDTSTSTVYMELSSLRSEDTAVYYCARDSTDVIDYW | | |
| GQGTLVTVSS | | |
| QVQLVQSGAEVKKPGASVKVSCKASGYIFTSYDINWVRQAPGQGLEWMGWINP | 282 | 9472 |
| NSGDTKYAQNFQGRVTMTRDTSTSTVYMELSSLRSEDTAVYYCARDGGTVTPTEE | | |
| YYYYGMDVWGQGTLVTVSS | | |
| QVQLVQSGAEVKKPGASVKVSCKASGGTFSSYAISWVRQAPGQGLEWMGWISV | 283 | 9473 |
| YNGNTNYAQNLQGRVTMTRDTSTSTVYMELSSLRSEDTAVYYCASLDDLDYWGQ | | |
| GTLVTVSS | | |
| QVQLVQSGAEVKKPGASVKVSCKASGHTFTSYYIHWVRQAPGQGLEWMGWINP | 284 | 9474 |
| NNGGTHYAQKFQGRVTMTRDTSTSTVYMELSSLRSEDTAVYYCARDMVRDSAEY | | |
| FQHWGQGTLVTVSS | | |
| QVQLVQSGAEVKKPGSSVKVSCKASGYTFITSYIHWVRQAPGQGLEWMGMINPS | 285 | 9475 |
| GGTTTYAQKFQGRVTITADESTSTAYMELSSLRSEDTAVYYCARDSSGYPIDYWGQ | | |
| GTLVTVSS | | |
| QVQLVQSGAEVKKPGSSVKVSCKASGYTFTSYDINWVRQAPGQGLEWMGGIIPL | 286 | 9476 |
| SGAPNYAHKFQGRVTITADESTSTAYMELSSLRSEDTAVYYCARGALYNWNDGW | | |
| FDPWGQGTLVTVSS | | |
| EVQLLESGGGLVQPGGSLRLSCAASGFTVGSWYMSWVRQAPGKGLEWVAGIWY | 287 | 9477 |
| EGSNKYYADSVKGRFTISRDNSKNTLYLQMNSLRAEDTAVYYCARLGTASLPYFDY | | |
| WGQGTLVTVSS | | |
| QVQLVQSGAEVKKPGASVKVSCKASGYTFTGYYMHWVRQAPGQGLEWVGWIN | 288 | 9478 |
| PNRGDTKYAQKFQGRVTMTRDTSTSTVYMELSSLRSEDTAVYYCARESGDGFDP | | |
| WGQGTLVTVSS | | |
| QVQLVQSGAEVKKPGSSVKVSCKASGYTFTNYYIHWVRQAPGQGLEWMGWMN | 289 | 9479 |
| PNSGNTGYAQKFQGRVTITADESTSTAYMELSSLRSEDTAVYYCARDWPNWFDP | | |
| WGQGTLVTVSS | | |
| QVQLVQSGAEVKKPGASVKVSCKASGYSFTDNYIHWVRQAPGQGLEWMGWIRS | 290 | 9480 |
| DNGETSYAQKFQGRVTMTRDTSTSTVYMELSSLRSEDTAVYYCAREVQLVGFDY | | |
| WGQGTLVTVSS | | |
| QVQLVQSGAEVKKPGSSVKVSCKASGYTFSDHHVHWVRQAPGQGLEWMGGIIPI | 291 | 9481 |
| FGTANYAQKFQGRVTITADESTSTAYMELSSLRSEDTAVYYCARGSSWYLHFQHW | | |
| GQGTLVTVSS | | |
| QVQLVQSGAEVKKPGSSVKVSCKASGGTFSSYAIYWVRQAPGQGLEWMGGIIPIF | 292 | 9482 |
| GTTNYAQKFQGRVTITADESTSTAYMELSSLRSEDTAVYYCAKGVDRYNWNDAFD | | |
| YWGQGTLVTVSS | | |
| QVQLVQSGAEVKKPGASVKVSCKASGYTFTDYYMHWVRQAPGQGLEWMGWIH | 293 | 9483 |
| SNSGGTHSAQKFQGRVTMTRDTSTSTVYMELSSLRSEDTAVYYCARESSGYDSSLD | | |
| YWGQGTLVTVSS | | |
| QVQLVQSGAEVKKPGASVKVSCKASGGTFSSYGISWVRQAPGQGLEWVGWINP | 294 | 9484 |
| NSGDTDYAQKFQGRVTMTRDTSTSTVYMELSSLRSEDTAVYYCTTDPRLDSSDPG | | |
| YWGQGTLVTVSS | | |
| QVQLVQSGAEVKKPGASVKVSCKASGGTFGNYGINWVRQAPGQGLEWMGWIS | 295 | 9485 |
| AYNGNTNYAQKFQGRVTMTRDTSTSTVYMELSSLRSEDTAVYYCARGGMDVWG | | |
| QGTLVTVSS | | |
| QVQLVQSGAEVKKPGASVKVSCKASGGTFSRYGIAWVRQAPGQGLEWMGISYPS | 296 | 9486 |
| DGSTSSAQKLQGRVTMTRDTSTSTVYMELSSLRSEDTAVYYCARDRLGDLDYWG | | |
| QGTLVTVSS | | |
| QVQLVQSGAEVKKPGASVKVSCKASGGTFSSYAISWVRQAPGQGLEWMGWMN | 297 | 9487 |
| PNSGNTGYAQKFQGRVTMTRDTSTSTVYMELSSLRSEDTAVYYCARDSIVGGYPF | | |
| DYWGQGTLVTVSS | | |
| QVQLVQSGAEVKKPGSSVKVSCKASGYTFTSYDINWVRQAPGQGLEWMGTITPIF | 298 | 9488 |
| GTTDYAQKFQGRVTITADESTSTAYMELSSLRSEDTAVYYCAREGYSSSWHDDAFD | | |
| IWGQGTLVTVSS | | |
| QVQLVQSGAEVKKPGASVKVSCKASGGTFSNYAISWVRQAPGQGLEWMGIIDPS | 299 | 9489 |
| GGSTSYAQKFQGRVTMTRDTSTSTVYMELSSLRSEDTAVYYCARDLGDYGLDSW | | |
| GQGTLVTVSS | | |
| QVQLVQSGAEVKKPGASVKVSCKASGYTFTGYYMHWVRQAPGQGLEWMGWM | 300 | 9490 |
| NPNSGDTGYAQRFQGRVTMTRDTSTSTVYMELSSLRSEDTAVYYCATGGSDSSGY | | |
| YYEGYFQHWGQGTLVTVSS | | |
| QVQLVQSGAEVKKPGASVKVSCKASGGTFSSYAISWVRQAPGQGLEWLGYMSP | 301 | 9491 |
| NSGNTGYAQKFQGRVTMTRDTSTSTVYMELSSLRSEDTAVYYCARDKGGYYDSSG | | |
| YYWYWGQGTLVTVSS | | |
| EVQLLESGGGLVQPGGSLRLSCAASGFSLSSYEMHWVRQAPGKGLEWVSAISSNG | 302 | 9492 |
| GSTYYADSVKGRFTISRDNSKNTLYLQMNSLRAEDTAVYYCARVGDGDGYNPDFD | | |
| YWGQGTLVTVSS | | |
| QVQLVQSGAEVKKPGSSVKVSCKASGYTFTSYGISWVRQAPGQGLEWMGWIDP | 303 | 9493 |
| TSGATDTAHKFQGRVTITADESTSTAYMELSSLRSEDTAVYYCAKDPIVATEVDYW | | |
| GQGTLVTVSS | | |
| QVQLVQSGAEVKKPGASVKVSCKASGGTFSSYAISWVRQAPGQGLEWMGWMS | 304 | 9494 |
| PNSGNTGYAQKFQGRVTMTRDTSTSTVYMELSSLRSEDTAVYYCARDSGAFDIW | | |
| GQGTMVTVSS | | |
| QVQLVQSGAEVKKPGASVKVSCKASGVTISNYAISWVRQAPGQGLEWMGWMN | 305 | 9495 |
| PNSGNTGYAQKFQGRVTMTRDTSTSTVYMELSSLRSEDTAVYYCAREGLLDAFDI | | |
| WGQGTMVTVSS | | |
| QVQLVQSGAEVKKPGASVKVSCKASGGTFSRYGITWVRQAPGQGLEWMGWM | 306 | 9496 |
| NPYDGNTGYAQKFQGRVTMTRDTSTSTVYMELSSLRSEDTAVYYCARGGRHHDA | | |
| FDIWGQGTMVTVSS | | |
| QVQLVQSGAEVKKPGASVKVSCKASGGTFSSYAISWVRQAPGQGLEWMGIINPS | 307 | 9497 |
| GDGTNYAQKFQGRVTMTRDTSTSTVYMELSSLRSEDTAVYYCARDISNDAFDIWG | | |
| QGTMVTVSS | | |
| QVQLVQSGAEVKKPGASVKVSCKASGYILTGHYMHWVRQAPGQGLEWMGWIS | 308 | 9498 |
| AYNGDTNYAQKFQGRVTMTRDTSTSTVYMELSSLRSEDTAVYYCARGSSWDDAF | | |
| DIWGQGTMVTVSS | | |
| EVQLVESGGGLVKPGGSLRLSCAASGFTFSNHYTSWVRQAPGKGLEWVSAIGAG | 309 | 9499 |
| GGTYYADSVKGRFTISRDDSKNTLYLQMNSLKTEDTAVYYCAREGWNDDVFDIW | | |
| GQGTMVTVSS | | |
| QVQLVQSGAEVKKPGASVKVSCKASGGTFSSYAISWVRQAPGQGLEWVGIINPSA | 310 | 9500 |
| GTTYYAERFQGRVTMTRDTSTSTVYMELSSLRSEDTAVYYCARDGNFGAFDIWGQ | | |
| GTMVTVSS | | |
| QVQLVQSGAEVKKPGSSVKVSCKASGYSFTTYAITWVRQAPGQGLEWMGEIIPIF | 311 | 9501 |
| GTANYAQKFQGRVTITADESTSTAYMELSSLRSEDTAVYYCARDKSGWNYGSGSY | | |
| NDAFDIWGQGTMVTVSS | | |
| QVQLVQSGAEVKKPGASVKVSCKASGYAFTGYYMHWVRQAPGQGLEWMGW | 312 | 9502 |
| MNPNSGKTEYAQKFQGRVTMTRDTSTSTVYMELSSLRSEDTAVYYCARDGGLDF | | |
| DYWGQGTMVTVSS | | |
| QVQLVQSGAEVKKPGASVKVSCKASGYTFTTYYIHWVRQAPGQGLEWMGWMN | 313 | 9503 |
| PNTGDTGSAQKFQGRVTMTRDTSTSTVYMELSSLRSEDTAVYYCAKDPAVTPDAF | | |
| DIWGQGTMVTVSS | | |
| QVQLVQSGAEVKKPGASVKVSCKASGGTLSSYAISWVRQAPGQGLEWMGIIDPS | 314 | 9504 |
| GGGTSYAQKLQGRVTMTRDTSTSTVYMELSSLRSEDTAVYYCAGSLYYYGMDVW | | |
| GQGTMVTVSS | | |
| QVQLVQSGAEVKKPGSSVKVSCKASGGTFGSSAISWVRQAPGQGLEWMGGIIPIF | 315 | 9505 |
| GTANYAQKFQGRVTITADESTSTAYMELSSLRSEDTAVYYCAKEDDILPPRAFDIW | | |
| GQGTMVTVSS | | |
| EVQLLESGGGLVQPGGSLRLSCAASGFTFDDYAMHWVRQAPGKGLEWVSGISGG | 316 | 9506 |
| GGVTYYADSVKGRFTISRDNSKNTLYLQMNSLRAEDTAVYYCARVYSSGWLDAFDI | | |
| WGQGTMVTVSS | | |
| QVQLVQSGAEVKKPGASVKVSCKASGGTFSSYAISWVRQAPGQGLEWMGWISG | 317 | 9507 |
| YNGNTNYAQKFQGRVTMTRDTSTSTVYMELSSLRSEDTAVYYCASSDVSPDAFDI | | |
| WGQGTTVTVSS | | |
| QVQLVQSGAEVKKPGASVKVSCKASGGTQNIYAITWVRQAPGQGLEWVGWVN | 318 | 9508 |
| PNSGNTGYSQKFQGRVTMTRDTSTSTVYMELSSLRSEDTAVYYCATPTSSSDDAF | | |
| DIWGQGTTVTVSS | | |
| QVQLVQSGAEVKKPGSSVKVSCKASGGTFSSYAISWVRQAPGQGLEWMGWINP | 319 | 9509 |
| NSGGTNYAQKFQGRVTITADESTSTAYMELSSLRSEDTAVYYCARASRGDDAFDI | | |
| WGQGTTVTVSS | | |
| QVQLVQSGAEVKKPGASVKVSCKASGIPFTSDDINWVRQAPGQGLEWMGIINPS | 320 | 9510 |
| GGSTSYAQKFQGRVTMTRDTSTSTVYMELSSLRSEDTAVYYCARERYEGGYSSGP | | |
| GNYYYGMDVWGQGTTVTVSS | | |
| QVQLVQSGAEVKKPGASVKVSCKASGGTFSNYAISWVRQAPGQGLEWMGWM | 321 | 9511 |
| NPNSGNTGYAQKFQGRVTMTRDTSTSTVYMELSSLRSEDTAVYYCARDDDYGDY | | |
| PVWGQGTTVTVSS | | |
| QVQLVQSGAEVKKPGASVKVSCKASGDTFSDHAINWVRQAPGQGLEWMGWM | 322 | 9512 |
| NPKIGNTGYAQKFQGRVTMTRDTSTSTVYMELSSLRSEDTAVYYCVYDSSGYDAF | | |
| DIWGQGTTVTVSS | | |
| QVQLVQSGAEVKKPGASVKVSCKASGYTFTSYDINWVRQAPGQGLEWMGRINP | 323 | 9513 |
| GTGGTDYAHKFQGRVTMTRDTSTSTVYMELSSLRSEDTAVYYCARETPSDYYDSS | | |
| GYYYNDAFDIWGQGTTVTVSS | | |
| QVQLVQSGAEVKKPGSSVKVSCKASGGTFSSYAISWVRQAPGQGLEWVGIIIPSG | 324 | 9514 |
| GTNYAQTFQGRVTITADESTSTAYMELSSLRSEDTAVYYCARDLGTTFDIWGQGTT | | |
| VTVSS | | |
| QVQLVQSGAEVKKPGASVKVSCKASGYTFTAYYLHWVRQAPGQGLEWIGWINP | 325 | 9515 |
| DNDNAYYAQKFQGRVTMTRDTSTSTVYMELSSLRSEDTAVYYCAKDIAVAALAYG | | |
| MDVWGQGTTVTVSS | | |
| EVQLLESGGGLVQPGGSLRLSCAASGFTFSSYAMSWVRQAPGKGLEWVAVISYD | 326 | 9516 |
| GSDQYYADSVKGRFTISRDNSKNTLYLQMNSLRAEDTAVYYCARQSLYYYYGMDV | | |
| WGQGTTVTVSS | | |
| QVQLVQSGAEVKKPGSSVKVSCKASGYTFTDYYVHWVRQAPGQGLEWVGWIST | 327 | 9517 |
| FTGNTDYAQNFQGRVTITADESTSTAYMELSSLRSEDTAVYYCARDAPLAAAGTDY | | |
| YYGMDVWGQGTTVTVSS | | |
| EVQLLESGGGLVQPGGSLRLSCAASGFTFSSYAMSWVRQAPGKGLEWVAFISDD | 328 | 9518 |
| GITKYYADSVKGRFTISRDNSKNTLYLQMNSLRAEDTAVYYCARDDSSGYGGMDV | | |
| WGQGTTVTVSS | | |
| EVQLLESGGGLVQPGGSLRLSCAASGFTFSSYAMHWVRQAPGKGLEWVAVISYD | 329 | 9519 |
| GGDKYYADSVKGRFTISRDNSKNTLYLQMNSLRAEDTAVYYCASGSLVLGYYYMD | | |
| VWGQGTTVTVSS | | |
| QVQLVQSGAEVKKPGASVKVSCKASGYTFTNYYIHWVRQAPGQGLEWMGWINP | 330 | 9520 |
| NTGGTDYAQKFQGRVTMTRDTSTSTVYMELSSLRSEDTAVYYCATGGGGSYYDAF | | |
| DVWGQGTTVTVSS | | |
| QVQLVQSGAEVKKPGASVKVSCKASGGTFSSYAISWVRQAPGQGLEWMGRINP | 331 | 9521 |
| NSGNTGYAQKFQGRVTMTRDTSTSTVYMELSSLRSEDTAVYYCARDIGEGYSMD | | |
| VWGQGTTVTVSS | | |
| EVQLLESGGGLVQPGGSLRLSCAASGFTFSNHYTSWVRQAPGKGLEWVAVISYDG | 332 | 9522 |
| SNKYYADSVKGRFTISRDNSKNTLYLQMNSLRAEDTAVYYCAREEKYSSSWYVGVD | | |
| AFDIWGQGTTVTVSS | | |
| EVQLLESGGGLVQPGGSLRLSCAASGFTFSSSAMHWVRQAPGKGLEWISSISGSG | 333 | 9523 |
| DNAYYADSVKGRFTISRDNSKNTLYLQMNSLRAEDTAVYYCARDQEDYYYDSSGY | | |
| GMDVWGQGTTVTVSS | | |
| QVQLVQSGAEVKKPGSSVKVSCKASGGTFSSHAISWVRQAPGQGLEWMGGIIPIF | 334 | 9524 |
| GTANYAQKFQGRVTITADESTSTAYMELSSLRSEDTAVYYCAKGDWGIVVVPAAIG | | |
| AFDIWGQGTTVTVSS | | |
| QVQLVQSGAEVKKPGSSVKVSCKASGYTFTAYYMHWVRQAPGQGLEWVGRISP | 335 | 9525 |
| VFGSTTYAQRFQGRVTITADESTSTAYMELSSLRSEDTAVYYCARDLGYYDSSGYRY | | |
| DAFDIWGQGTTVTVSS | | |
| QVQLVQSGAEVKKPGSSVKVSCKASGYTFTSYDINWVRQAPGQGLEWMGGISP | 336 | 9526 |
| MFGTANYAQKFQGRVTITADESTSTAYMELSSLRSEDTAVYYCAKDGWYYGMDV | | |
| WGQGTTVTVSS | | |
| QVQLVQSGAEVKKPGSSVKVSCKASGGTFSSYGISWVRQAPGQGLEWMGWINP | 337 | 9527 |
| NSGGTKYAQKFQGRVTITADESTSTAYMELSSLRSEDTAVYYCARGEAGNLDWYF | | |
| DLWGRGTLVTVSS | | |
| QVQLVQSGAEVKKPGASVKVSCKASGGTFSNYGISWVRQAPGQGLEWMGWIN | 338 | 9528 |
| PNNGDTKYAQKFQGRVTMTRDTSTSTVYMELSSLRSEDTAVYYCAREDVWYFDL | | |
| WGRGTLVTVSS | | |
| QVQLVQSGAEVKKPGASVKVSCKASGYTFTTYGISWVRQAPGQGLEWMGWIST | 339 | 9529 |
| YDGKTNYAQKLQGRVTMTRDTSTSTVYMELSSLRSEDTAVYYCALHLGGDWYFDL | | |
| WGRGTLVTVSS | | |
| QVQLVQSGAEVKKPGASVKVSCKASGYTFTGYYMHWVRQAPGQGLEWMGWI | 340 | 9530 |
| NPNTGATYYAQKFQGRVTMTRDTSTSTVYMELSSLRSEDTAVYYCARQHGDYDW | | |
| YFDLWGRGTLVTVSS | | |
| QVQLVQSGAEVKKPGASVKVSCKASGDTFTTYYVHWVRQAPGQGLEWMGWIN | 341 | 9531 |
| PNSGNTGYAQKFQGRVTMTRDTSTSTVYMELSSLRSEDTAVYYCARDSGRHWGQ | | |
| GTLVTVSS | | |
| QVQLVQSGAEVKKPGSSVKVSCKASGGTFSSYGISWVRQAPGQGLEWMGRIIPM | 342 | 9532 |
| LGIANYAQKFQGRVTITADESTSTAYMELSSLRSEDTAVYYCVREEVAGANWFDP | | |
| WGQGTLVTVSS | | |
| QVQLVQSGAEVKKPGASVKVSCKASGYTFTSYAMNWVRQAPGQGLEWMGIINP | 343 | 9533 |
| SGGSTSYARKFQGRVTMTRDTSTSTVYMELSSLRSEDTAVYYCAREGDYGSGEFDY | | |
| WGQGTLVTVSS | | |
| QVQLVQSGAEVKKPGASVKVSCKASGYTFTSSYMHWVRQAPGQGLEWMGWM | 344 | 9534 |
| NPRSGNTGYAQKFQGRVTMTRDTSTSTVYMELSSLRSEDTAVYYCARERDDYGDY | | |
| GWLDYWGQGTLVTVSS | | |
| QVQLVQSGAEVKKPGASVKVSCKASGYTFTGYYMHWVRQAPGQGLEWMGIINP | 345 | 9535 |
| SGGSTSYAQKFQGRVTMTRDTSTSTVYMELSSLRSEDTAVYYCARDLYDSSGYWH | | |
| YYYYMDVWGKGTTVTVSS | | |
| QVQLVQSGAEVKKPGSSVKVSCKASGGTFSSYAFSWVRQAPGQGLEWMGWINP | 346 | 9536 |
| NSGGTNYAQKFQGRVTITADESTSTAYMELSSLRSEDTAVYYCARFSGYDYVDYW | | |
| GQGTLVTVSS | | |
| QVQLVQSGAEVKKPGASVKVSCKASGGTFSSYAISWVRQAPGQGLEWMGIINPN | 347 | 9537 |
| GGNTSYAQKFQGRVTMTRDTSTSTVYMELSSLRSEDTAVYYCARDVGEDFDLWG | | |
| QGTMVTVSS | | |
| QVQLVQSGAEVKKPGSSVKVSCKASGYTFTSYYIHWVRQAPGQGLEWLGVINPA | 348 | 9538 |
| DGDTTYAQMFQGRVTITADESTSTAYMELSSLRSEDTAVYYCARDFDWLFAMDV | | |
| WGKGTTVTVSS | | |
| QVQLVQSGAEVKKPGASVKVSCKASGGTFSNYALNWVRQAPGQGLEWMGRIN | 349 | 9539 |
| PNGGTTYYAKNFQGRVTMTRDTSTSTVYMELSSLRSEDTAVYYCAKHGDHGFYV | | |
| WGLWTKGTVSS | | |
| QVQLVQSGAEVKKPGASVKVSCKASGGTFSSYAISWVRQAPGQGLEWMGMINP | 350 | 9540 |
| NVGSATYAQRFQGRVTMTRDTSTSTVYMELSSLRSEDTAVYYCAREDSGTSWFDP | | |
| WGQGTLVTVSS | | |
| QVQLVQSGAEVKKPGASVKVSCKASGYTFTSYYMHWVRQAPGQGLEWMGIINP | 351 | 9541 |
| SDGSTSYAQRFQGRVTMTRDTSTSTVYMELSSLRSEDTAVYYCARDDRGSNYYYG | | |
| MDVWGQGTTVTVSS | | |
| QVQLVQSGAEVKKPGASVKVSCKASGYTFTAYYVHWVRQAPGQGLEWMGWM | 352 | 9542 |
| NPNSGTTGYAQKFQGRVTMTRDTSTSTVYMELSSLRSEDTAVYYCARDSSDYYGD | | |
| YRADAFDIWGQGTMVTVSS | | |
| QVQLVQSGAEVKKPGSSVKVSCKASGYTFTSYDINWVRQAPGQGLEWMGVISPS | 353 | 9543 |
| GDATLYAQSFQGRVTITADESTSTAYMELSSLRSEDTAVYYCVKGLDHWGQGTLV | | |
| TVSS | | |
| EVQLLESGGGLVQPGGSLRLSCAASGFSFSDYGMHWVRQAPGKGLEWVSAIGGI | 354 | 9544 |
| GDSTYYADSVKGRFTISRDNSKNTLYLQMNSLRAEDTAVYYCARMNYGDSNYYYY | | |
| YGMDVWGQGTTVTVSS | | |
| QVQLVQSGAEVKKPGASVKVSCKASGYTFTSYDISWVRQAPGQGLEWMGMISPS | 355 | 9545 |
| DGSTTYAPKFQGRVTMTRDTSTSTVYMELSSLRSEDTAVYYCARGAVGFDYWGQ | | |
| GTLVTVSS | | |
| QVQLVQSGAEVKKPGSSVKVSCKASGYTFTSYGISWVRQAPGQGLEWMGWINT | 356 | 9546 |
| YSGYTDYAHKFQGRVTITADESTSTAYMELSSLRSEDTAVYYCTTDDFLSFGYWGQ | | |
| GTLVTVSS | | |
| QVQLVQSGAEVKKPGSSVKVSCKASGYMFTDYYIHWVRQAPGQGLEWMGGIIP | 357 | 9547 |
| YFGTANYAQKFQGRVTITADESTSTAYMELSSLRSEDTAVYYCARSISGSYVLDAFDI | | |
| WGQGTTVTVSS | | |
| QVQLVQSGAEVKKPGSSVKVSCKASGYTFNSYGISWVRQAPGQGLEWMGGIIPIF | 358 | 9548 |
| GTANYAQKFQGRVTITADESTSTAYMELSSLRSEDTAVYYCARDWGYGDYADDAF | | |
| DIWGQGTMVTVSS | | |
| QVQLVQSGAEVKKPGSSVKVSCKASGGTFSNNDINWVRQAPGQGLEWMGWIN | 359 | 9549 |
| PIYGSANYAQNFQGRVTITADESTSTAYMELSSLRSEDTAVYYCAADWRGFDYWG | | |
| QGTLVTVSS | | |
| QVQLVQSGAEVKKPGASVKVSCKASGYTFTEYAIHWVRQAPGQGLEWMGRMN | 360 | 9550 |
| PHNGDTGYAQKFQGRVTMTRDTSTSTVYMELSSLRSEDTAVYYCAREGDYLGYPI | | |
| DCWGRGTLVTVSS | | |
| EVQLLESGGGLVQPGGSLRLSCAASGFTFSDYSMSWVRQAPGKGLEWVAAIWQ | 361 | 9551 |
| DGNVKFYADSVKGRFTISRDNSKNTLYLQMNSLRAEDTAVYYCARDGNSGYVFW | | |
| GQGTLVTVSS | | |
| QVQLVQSGAEVKKPGASVKVSCKASGYTFTTYYMHWVRQAPGQGLEWMGWIN | 362 | 9552 |
| PNTGDTAYAQKIQGRVTMTRDTSTSTVYMELSSLRSEDTAVYYCARTAEAVAGLP | | |
| AFDYWGQGTLVTVSS | | |
| QVQLVQSGAEVKKPGSSVKVSCKASGGTSNNYAIDWVRQAPGQGLEWMGGIIPL | 363 | 9553 |
| FGTTTYAQKFQGRVTITADESTSTAYMELSSLRSEDTAVYYCARVTLYGDYDYWGQ | | |
| GTLVTVSS | | |
| QVQLVQSGAEVKKPGASVKVSCKASGYSLITHWMHWVRQAPGQGLEWMGMI | 364 | 9554 |
| NPSDGVTYYAQTFQGRVTMTRDTSTSTVYMELSSLRSEDTAVYYCAREYYGEGFD | | |
| YWGQGTLVTVSS | | |
| QVQLVQSGAEVKKPGASVKVSCKASGGTFSSYAISWVRQAPGQGLEWMGIINPS | 365 | 9555 |
| GGSTSNAQKFQGRVTMTRDTSTSTVYMELSSLRSEDTAVYYCARDLGDTAMDG | | |
| WGQGTLVTVSS | | |
| QVQLVQSGAEVKKPGASVKVSCKASGYTFTSYYLHWVRQAPGQGLEWMGIITPS | 366 | 9556 |
| GGSTTYAHKFQGRVTMTRDTSTSTVYMELSSLRSEDTAVYYCARDGGLASFDYWG | | |
| QGTLVTVSS | | |
| QVQLVQSGAEVKKPGASVKVSCKASGGTFSSYAISWVRQAPGQGLEWMGWMN | 367 | 9557 |
| PNSGNTGYAQKFQGRVTMTRDTSTSTVYMELSSLRSEDTAVYYCARGGGWAMT | | |
| DAFDIWGQGTMVTVSS | | |
| EVQLVESGGGLVKPGGSLRLSCAASGFTFDDYGMSWVRQAPGKGLEWVSLIYSG | 368 | 9558 |
| GDTYYADSVKGRFTISRDDSKNTLYLQMNSLKTEDTAVYYCTRKEYYYDSSGYLRLF | | |
| DYWGQGTLVTVSS | | |
| QVQLVQSGAEVKKPGSSVKVSCKASGYTFTDYYMHWVRQAPGQGLEWMGGIN | 369 | 9559 |
| PIFGTSNYAQKFQGRVTITADESTSTAYMELSSLRSEDTAVYYCARDISGYDYYYYG | | |
| MDVWGQGTTVTVSS | | |
| QVQLVQSGAEVKKPGASVKVSCKASGGTLNNYAFSWVRQAPGQGLEWMGMID | 370 | 9560 |
| PSDGTIAYAQKFQGRVTMTRDTSTSTVYMELSSLRSEDTAVYYCARSDYDFWSGL | | |
| GGYFDYWGQGTLVTVSS | | |
| QVQLVQSGAEVKKPGASVKVSCKASGGTFSSYAISWVRQAPGQGLEWMGTIDP | 371 | 9561 |
| NSGGTMFAQKFQGRVTMTRDTSTSTVYMELSSLRSEDTAVYYCARDSAEWELGG | | |
| SFDYWGQGTLVTVSS | | |
| EVQLLESGGGLVQPGGSLRLSCAASGFTFSNHYTSWVRQAPGKGLEWVSSIGVNG | 372 | 9562 |
| DTYYLDSVKGRFTISRDNSKNTLYLQMNSLRAEDTAVYYCAREGLVFSGRGHWYF | | |
| DLWGRGTLVTVSS | | |
| QVQLVQSGAEVKKPGASVKVSCKASGGTFSNYAISWVRQAPGQGLEWMGRINP | 373 | 9563 |
| NGGNTSNAQKFQGRVTMTRDTSTSTVYMELSSLRSEDTAVYYCARDYEDADFDG | | |
| WGQGTLVTVSS | | |
| QVQLVQSGAEVKKPGASVKVSCKASGYTFSDHHVHWVRQAPGQGLEWMGWM | 374 | 9564 |
| NPDSGNTGYAQRFQGRVTMTRDTSTSTVYMELSSLRSEDTAVYYCARDSTSGVDY | | |
| WGQGTLVTVSS | | |
| EVQLLESGGGLVQPGGSLRLSCAASGFTFSSYAMSWVRQAPGKGLEWVAVISYD | 375 | 9565 |
| GHDQFYADSVKGRFTISRDNSKNTLYLQMNSLRAEDTAVYYCARGEQQLEGFYYY | | |
| YGMDVWGQGTTVTVSS | | |
| EVQLLESGGGLVQPGGSLRLSCAASGFTFSSYWMHWVRQAPGKGLEWVAVISYD | 376 | 9566 |
| GSKEYYADSVKGRFTISRDNSKNTLYLQMNSLRAEDTAVYYCASDYGDYGTYDYW | | |
| GQGTLVTVSS | | |
| EVQLLESGGGLVQPGGSLRLSCAASGFTFSSYWMHWVRQAPGKGLEWVSGISGG | 377 | 9567 |
| GDDTYYADSVKGRFTISRDNSKNTLYLQMNSLRAEDTAVYYCAREPLAYCGGDCP | | |
| GGFDYWGQGTLVTVSS | | |
| EVQLLESGGGLVQPGGSLRLSCAASGFTFSDHYMDWVRQAPGKGLEWVSAIGTG | 378 | 9568 |
| GDTYYADSVKGRFTISRDNSKNTLYLQMNSLRAEDTAVYYCARHEDTAIFLDYWG | | |
| QGTLVTVSS | | |
| QVQLVQSGAEVKKPGASVKVSCKASGYTFTSYYMHWVRQAPGQGLEWMGMIS | 379 | 9569 |
| PSDGSTTYAPKFQGRVTMTRDTSTSTVYMELSSLRSEDTAVYYCARDGYDAWSYG | | |
| MDVWGQGTMVTVSS | | |
| QVQLVQSGAEVKKPGSSVKVSCKASGYTFTGYYMHWVRQAPGQGLEWMGWM | 380 | 9570 |
| NPNSGNTGYAQKFQGRVTITADESTSTAYMELSSLRSEDTAVYYCARDGVTGTDY | | |
| WGQGTLVTVSS | | |
| EVQLLESGGGLVQPGGSLRLSCAASGFAFSSYVLHWVRQAPGKGLEWVSAISGAG | 381 | 9571 |
| DSTYYADSVKGRFTISRDNSKNTLYLQMNSLRAEDTAVYYCAREPTTVTDDWYFDL | | |
| WGRGTLVTVSS | | |
| EVQLVESGGGLVKPGGSLRLSCAASGFAFSSHWMHWVRQAPGKGLEWVSAISG | 382 | 9572 |
| NGDNSYYADSVKGRFTISRDDSKNTLYLQMNSLKTEDTAVYYCARDRAPEYFDLW | | |
| GRGTLVTVSS | | |
| QVQLVQSGAEVKKPGASVKVSCKASGGTFSSYAISWVRQAPGQGLEWMGWINP | 383 | 9573 |
| NSGGTNYAQKFQGRVTMTRDTSTSTVYMELSSLRSEDTAVYYCARDDYGDYGGG | | |
| MDVWGQGTTVTVSS | | |
| QVQLVQSGAEVKKPGASVKVSCKASGYTFTDYYMHWVRQAPGQGLEWMGWM | 384 | 9574 |
| NPNSGHTGYAEKFQGRVTMTRDTSTSTVYMELSSLRSEDTAVYYCAKDTSPRYGD | | |
| GFFDYWGQGTLVTVSS | | |
| EVQLLESGGGLVQPGGSLRLSCAASGFTFSSYWMHWVRQAPGKGLEWVAVTSY | 385 | 9575 |
| DGSNKYYADSVKGRFTISRDNSKNTLYLQMNSLRAEDTAVYYCARESGFSAEYFQH | | |
| WGQGTLVTVSS | | |
| QVQLVQSGAEVKKPGASVKVSCKASGGTFSSYAISWVRQAPGQGLEWMGIINPS | 386 | 9576 |
| GGSTSYAQKFQGRVTMTRDTSTSTVYMELSSLRSEDTAVYYCARATGLYCSGSCFD | | |
| YWGQGTLVTVSS | | |
| DLGKKLLEAARAGQDDEVRILMANGADVNAMDHFGFTPLHLAAKVGHLEIVEVLL | 387 | 14114 |
| KYGADVNADDMDGETPLHLAAAIGHLEIVEVLLKNGADVNAHDTWGFTPLHLAA | | |
| SYGHLEIVEVLRKYGADVNAQDKFGETTFDISIDNGNEDLAEILQKLN | | |
| EVQLVESGGGLVQAGGSLKLSCAASRSILDFNAMGWYRQAPGKQREWVTTIARA | 388 | 14115 |
| GATKYADSVKGRFSISRDNAKNTVYLQMSSLKPEDTATYYCNARVFDLPNDYWG | | |
| QGTQVTVSS | | |
| EVQLVESGGGLVQAGGSLRLSCAASGRTSASYSMGWFRQAPGKERE | 389 | 14000 |
| FVAAISWSGDETSYADSVKGRFTIARGNAKNTVYLQMNSLKSEDTA | | |
| IYYCAGDRWWRPAGLQWDYWGQGTQVTVSS | | |
| EVQLVESGGGLVQAGGSLKLSCAASRSILDFNAMGWYRQAPGKQRE | 390 | 14001 |
| WVTTIARAGATKYADSVKGRFSISRDNAKNTVYLQMSSLKPEDTAT | | |
| YYCNARVFDLPNDYWGQGTQVTVSS | | |
| EVQLVESGGGSVQPGGSLTLSCGTSGRTFNVMGWFRQAPGKEREFV | 391 | 14002 |
| AAVRWSSTGIYYTQYADSVKSRFTISRDNAKNTVYLEMNSLKPEDT | | |
| AVYYCAADTYNSNPARWDGYDFRGQGTQVTVSS | | |

TABLE 21
VL Sequences
Table 21-VL sequences

| | Binder | SEQ ID |
|---|---|---|
| Sequence | Name | NO: |
| DIKMTQSPSSMYASLGERVTITCKASQDINSYLSWFQQKPGKSPKTLIYRANRLVDG | 1 | 512 |
| VPSRFSGSGSGQDYSLTISSLEYEDMGIYYCLQYDEFPPTFGAGTKLELK | | |
| DIKMTQSPSSMYASLGERVTITCKASQDINSYLSWFQQKPGKSPKTLIYRANRLVDG | 2 | 513 |
| VPSRFSGSGSGQDYSLTISSLEYEDMGIYYCLQYDEFPPTFGAGTKLELK | | |
| DIQMTQSPASLSVSVGETVTITCRASENIYSNLAWYQQKQGKSPQLLVFAATYLADG | 3 | 514 |
| VPSRFSGSGSGTQYSLKINSLQSEDFGNYYCQHFWGTPWTFGGGTKLEIK | | |
| DIQMTQSPASLSVSVGETVTITCRASENIYSNLAWYQQKQGKSPQLLVYAATNLAD | 4 | 515 |
| GVPSRFSGSGSGTQYSLKINSLQSEDFGSYYCQHFWGTPWTFGGGTKLEIK | | |
| DIQMTQSPASLSVSVGETVTITCRASENIYSNLAWYQQKQGKSPQVLVYAATNLAD | 5 | 516 |
| GVPSRFSGSGSGTQYSLKINSLQSEDFGSYYCQHFWGSPWTFGGGTKLEIK | | |
| DIQMTQSPASLSVSVGETVTITCRASENIYSNLAWYQQKQGKSPRLLVYAATNLAD | 6 | 517 |
| GVPSRFSGSGSGTQYSLKITSLQSEDFGSYYCQHFWGTPWTFGGGTKLEIK | | |
| DIQMTQSPASLSVSVGETVTITCRASENIYSNLAWYQQKQGKSPQLLVYAATNLAD | 7 | 518 |
| GVPSRFSGSGSGTQYSLKINSLQSEDFGSYYCQHFWGTPWTFGGGTKLEIK | | |
| DIQMTQSPASLSVSVGETVTITCRASENIYSNLAWYQQKQGKSPQVLVYAATNVAD | 8 | 519 |
| GVPSRFSGSGSGTQYSLKINSLQSEDFGSYYCQHFWGTPWTFGGGTKLEIK | | |
| DIQMTQSPASLSVSVGETVTITCRASDNIYSNLAWYQQKQGKSPQLLVYAATNLAD | 9 | 520 |
| GVPSRFSGSGSGTQYSLKINSLQSEDFGSYYCQHFWGTPWTFGGGTKLEIK | | |
| DIQMTQSPASLSVSVGETVTITCRASENIYSNLAWYQQKQGKSPRLLVYAATNLAD | 10 | 521 |
| GVPSRFSGSGSGTQYSLKINSLQSEDFGSYYCQHFWGTPWTFGGGTKLEIK | | |
| DIQMTQSPASLSVSVGETVTITCRASENIYSNLAWYQQKQGKSPQLLVYAATNLAD | 11 | 522 |
| GVPSRFSGSGSGTQYSLKINSLQSEDFGSYYCQHFWGTPWTFGGGTKLEIK | | |
| DIQMTQSPASLSVSVGETVTITCRASENIYSNLAWYQQKQGKSPQLLVFAATYLADG | 12 | 523 |
| VPSRFSGSGSGTQYSLKINSLQSEDFGSYYCQHFWGTPWTFGGGTKLEIK | | |
| DIQMTQSPASLSVSVGETVTITCRASENIYSNLAWYQQKQGKSPQLLVYAATNLAD | 13 | 524 |
| GVPSRFSGSGSGTQYSLKINSLQSEDFGSYYCQHFWGSPWTFGGGTKLEIK | | |
| QIVLTQSPAIMSASPGEKVTMTCSASSSVSYMHWFQQKSGTSPKRWIYDTSKLASG | 14 | 525 |
| VPARFSGSGSGTSYSLTFSSMEAEDAATYYCQQWSSNPLYTFGGGTKLEIK | | |
| DIVLTQSPASLAVSLGQRATISCKASQSVDYDGDSYMNWYQQKPGQPPKLLIYAAS | 15 | 526 |
| NLESGIPARFSGSGSGTDFTLNIHPVEEEDAATYYCQQSNEDPLTFGGGTKLELK | | |
| EIQMTQSPSSMSASLGDRITITCQATQDIVKNLNWYQQKPGKPPSFLIYYATELAEG | 16 | 527 |
| VPSRFSGSGSGSDYSLTINNLESEDFADYYCLQFYEFPLTFGAGTKLELK | | |
| DIQMTQSPASLSVSVGETVTITCRASENIYSNLAWYQQKQGKSPQLLVYAATNLAD | 17 | 528 |
| GVPSRFSGSGSGTQYSLKINSLQSEDFGSYYCQHFWGTPWTFGGGTKLEIK | | |
| DIVMTQSPSSLAMSVGQKVTMSCKSSQSLLNSSNQKNYLAWYQQKPGQSPKLLVY | 18 | 529 |
| FASTRESGVPDRFIGSGSGTDFTLTISSVQAEDLADYFCQQHYSTPLTFGAGTKLELK | | |
| QIVLTQSPAIMSASPGEKVTITCSASSSVSYMHWFQQKPGTSPKLWIYSTSNLASGV | 19 | 530 |
| PARFSGSGSGTSYSLTISRMEAEDAATYYCQQRSSFPYTFGGGTKLEIK | | |
| SIVMTQTPKFLLVSAGDRVTITCKASQSVSNDVAWYQQKPGQSPKLLIYYASNRYTG | 20 | 531 |
| VPDRFTGSGYGTDFTFTISTVQAEDLAVYFCQQDYTSLPTFGAGTKLEIK | | |
| DIQMTQSPSSLSASLGDTITITCHASQNINVWLSWYQQKPGNIPKLLIYKASNLHTG | 21 | 532 |
| VPSRFSGSGSGTGFTLTISSLQPEDIATYYCQQGQSYPLTFGGGTNLEIK | | |
| ETTVTQSPASLSMAIGEKVTIRCITSTDIDDDMNWYQQKPGEPPKLLISEGNSLRPG | 22 | 533 |
| VPSRFSSSGYGTDFVFTIENMLSEDVADYYCLQSDNLPLTFGAGTKLELK | | |
| DIKMTQSPSSMYASLGERVTITCKASQDINSYLSWFQQKPGKSPKTLIYRANRLVDG | 23 | 534 |
| VPSRFSGSGSGQDYSLTISSLEYEDMGIYYCLQYDEFPPTFGAGTKLELK | | |
| DIQMTQSPSSLSASLGGKVTITCKASQDINKYIAWYQHKPGKGPSLLIHYTSTLQP | 24 | 535 |
| GIPSRFSGSGSGRDYSFSISNLEPEDIATYYCLQYDNLMYTFGGGTKLEIK | | |
| ENVLTQSPAIMSASLGEKVTMSCRASSSVNYMYWYQQKSDASPKLWIYYTSNLAP | 25 | 536 |
| GVPGRFSGSGSGNSYSLTISSMEGEDAATYYCQQFTSSHTFGGGTKLEIK | | |
| DIVLTQSPASLAVSLGQRATISCRASQSVSTSSYSYMHWYQQKPGQPPKLLIKYASN | 26 | 537 |
| LESGVPARFSGSGSGTDFTLNIHPVEEEDTATYYCQHSWEIPLTFGAGTKLELK | | |
| ETTVTQSPASLSVATGEKVSIRCMTSIDIDDDMNWYQQKPGEPPKLLISEGNTLRPG | 27 | 538 |
| VPSRFSSSGYGTDFVFTIENTLSEDVADYYCLQSDNMPFTFGSGTKLEIK | | |
| QAVVTQESALTTSPGGTVILTCRSSTGAVTTSNYANWVQEKPDHLFTGLIGGTSNR | 28 | 539 |
| APGVPVRFSGSLIGDKAALTITGAQTEDDAMYFCALWYSTHWVFGGGTKLTVL | | |
| QAVVTQESALTTSPGETVTLTCRSSTGAVTTSNYANWVQEKPDHLFTGLIGGTNNR | 29 | 540 |
| APGVPARFSGSLIGDKAALTITGAQTEDEAIYFCALWYSNHLFGSGTKVTVL | | |
| QAVVTQESALTTSPGETVTLTCRSSTGAVTTSNYANWVQEKPDHLFTGLIGGTNNR | 30 | 541 |
| APGVPARFSGSLIGDKAALTITGAQTEDEAIYFCALWYSNHWVFGGGTKLTVL | | |
| EIQMTQSPSSMSASLGDRITITCQATQDIVKNLNWYQQKPGKPPSFLIYYATELAEG | 31 | 542 |
| VPSRFSGSGSGSDYSLTISNLESEDFADYYCLQFYEFPYTFGGGTKLEIK | | |
| QIVLTQSPAIMSASPGEKVTMTCSASSSVSYMYWYQQKPGSSPRLLIYDTSNLASGV | 32 | 543 |
| PVRFSGSGSGTSYSLTISRMEAEDAATYYCQQWSSYPLTFGAGTKLELK | | |
| ETTVTQSPASLSVATGEKVTIRCITSTDIDDDMNWYQQKPGEPPKLLISEGNTLRPG | 33 | 544 |
| VPSRFFSGGYGTDFVFTIENTLSEDVADYYCLQSDNMPLMFGAGTKLELK | | |
| QIVLTQSPAIMSASPGEKVTITCSASSSVSYMHWFQQRPGTSPKLWIYSTSNLASGV | 34 | 545 |
| PARFSGSGSGTSYSLTISRMEAEDAATYYCQQRSTYPTFGGGTKLEIK | | |
| EIQMTQSPSSMSASLGDRITITCQATQDIVKNLNWYQQKPGKPPSFLIYYATELAEG | 35 | 546 |
| VPSRFSGSGSGSDYSLTISNLESEDFADYYCLQFYEFPYTFGGGTKLEIK | | |
| DIQMTQSPASLSASVGETVTITCRASGNIHNYLAWYQQKQGKSPQLLVYNAKTLAD | 36 | 547 |
| GVPSRFSGSGSGTQYSLKINSLQPEDFGSYYCQHFWSTPWTFGGGTKLEIK | | |
| DIQMTQSPASLSVSVGETVTITCRASENIYSNLAWYQQKQGKSPQLLVYAATNLAD | 37 | 548 |
| GVPSRFSGSGSGTQYSLKINSLQSEDFGSYYCQHFWGTPYTFGGGTKLEIK | | |
| DIKMTQSPSSMYASLGERVTITCKASQDINSYLSWFQQKPGKSPKTLIYRANRLVDG | 38 | 549 |
| VPSRFSGSGSGQDYSLTISSLEYEDMGIYYCLQYDEFPLTFGGGTKLEIKR | | |
| DIKMTQSPSSMYASLGERVTITCKASQDINGYLSWYQQKPGKSPQTLLYRANRLVD | 39 | 550 |
| GVPSRFRGSGSGQDYTLTISSLEYEDMGTYYCLQYDEFPPTFGGGTKLELKR | | |
| DIKMTQSPSSMYASLGERVTITCKASQDINSYLSWYQQKPGKSPKTLIYRAKRLVDG | 40 | 551 |
| VPSRFSGSGSGQDYTLTISSLEYEDMGTYYCLQYDEFPPTFGGGTKLELKR | | |
| DIKMTQSPSSMYASLGERVTITCKASQDINGYLSWFQQKPGKSPQTLLYRANRLVD | 41 | 552 |
| GVPSRFRGSGSGQDYSLTISSLEYEDMGIYYCLQYDEFPPTFGAGTKLELKR | | |
| DIKMTQSPSSMYASLGERVTITCKASQDINSYLSWFQQKPGKSPKTLIYRAKRLVDG | 42 | 553 |
| VPSRFSGSGSGQDYSLTISSLEYEDMGIYYCLQYDEFPPTFGAGTKLELKR | | |
| DIKMTQSPSSMYASLGERVTITCKASQDINSYLSWFQQKPGKSPKTLIYRANRLVDG | 43 | 554 |
| VPSRFSGSGSGQDYSLTISSLEYEDMGIYYCLHYDEFPPTFGAGTKLELKR | | |
| DIKMTQSPSSMYASLGERVTITCKASQDINSYLSWFQQKPGKSPKTLIYRANRLVDG | 44 | 555 |
| VPSRFSGSGSGQDYSLTISSLEYEDMGIYYCLQYDEFPPTFGAGTKLELKR | | |
| DIKMTQSPSSMYASLGERVTITCKASQDINSYLSWFQQKPGKSPKTLIYRANRLVDG | 45 | 556 |
| VPSRFSGSGSGQDYSLTISSLEYEDMGIYYCLQYDEFPPTFGAGTKLELKR | | |
| DIKMTQSPSSMYASLGERVTITCKASQDINSYLSWFQQKPGKSPKTLIYRANRLVDG | 46 | 557 |
| VPSRFSGSGSGQDYSLTISSLEYEDMGIYYCLQYDEFPPTFGAGTKLELKR | | |
| DIKMTQSPSSMYASLGERVTITCKASQDINSYLSWFQQKPGKSPKTLIYRANRLVDG | 47 | 558 |
| VPSRFSGSGSGQDYSLTISSLEYEDMGIYYCLQYDEFPPTFGAGTKLELKR | | |
| DIKMTQSPSSMYASLGERVTITCKASQDINSYLSWFQQKPGKSPKTLIYRANRLVDG | 48 | 559 |
| VPSRFSGSGSGQDYSLTISSLEYEDMGIYYCLQYDEFPPTFGAGTKLELKR | | |
| DIKMTQSPSSMYASLGERVTITCKASQDINSYLSWFHQKPGKSPKTLIYRANRLVDG | 49 | 560 |
| VPSRFSGSGSGQDYSLTISSLEYEDMGIYYCLQYDEFPPTFGAGTKLELKR | | |
| DIKMTQSPSSMYASLGERVTITCKASQDINSYLSWFQQKPGKSPKTLIYRANRLVDG | 50 | 561 |
| VPSRFSGSGSGQDYSLTISSLEYEDMGIYYCLQYDEFPPTFGAGTKLELKR | | |
| DIKMTQSPSSMYASLGERVTITCKASQDINSYLSWFQQKPGKSPKTLIYRANRLVDG | 51 | 562 |
| VPSRFSGSGSGQDYSLTISSLEYEDMGIYYCLQYDEFPPTFGAGTKLELKR | | |
| DIKMTQSPSSMYASLGERVTITCKASQDINSYLSWFQQKPGKSPKTLIYRANRLVDG | 52 | 563 |
| VPSRFSGSGSGQDYSLTISSLEYEDMGFYYCLQYDEFPPTFGAGTKLELKR | | |
| DIKMTQSPSSIYASLGERVTITCKASQDINSYLNWFQQKPGKSPKTLIYRANRLVDGV | 53 | 564 |
| PSRFSGSGSGQDYSLTISSLEYEDMGIYYCLQYDEFPPTFGVGTKLELKR | | |
| DIKMTQSPSSMYASLGERVTITCKASQDINSYLSWFQQKPGKSPKTLIYRANRLVDG | 54 | 565 |
| VPSRFSGSGSGQDYSLTISSLEYEDMGIYYCLQYDEFPPTFGAGTKLELKR | | |
| DIKMTQSPSSMYASLGERVTITCKASQDINSYLSWFQQKPGKSPKTLIYRANRLVDG | 55 | 566 |
| VPSRFSGSGSGQDYSLTISSLEYEDMGIYYCLQYDEFPPTFGCGTKLELKR | | |
| DIKMTQSPSSMYASLGERVTITCKASQDINSYLSWFQQKPGKSPKTLIYRANRLVDG | 56 | 567 |
| VPSRFSGSGSGQDYSLTISSLEYEDMGIYYCLQYDEFPPTFGCGTKLELKR | | |
| DIQMTQSPASLSVSVGETVTITCRASDNIYSNLAWYQQKQGKSPQLLVYAATNLAD | 57 | 568 |
| GVPSRFSGSGSGTQYSLKINSLQSEDFGSYYCQHFWGTPWTFGGGTKLEIKR | | |
| DIQMTQSPASLSVSVGETVTITCRASENIYSNLAWYQQKQGKSPQLLVFAATYLADG | 58 | 569 |
| VPSRFSGSGSGTQYSLKINSLQSEDFGNYYCQHFWGTPWTFGGGTKLEIKR | | |
| DIKMTQSPSSMYASLGERVTITCKASQDINSYLSWFQQKPGKSPKTLIYRANRLVDG | 59 | 570 |
| VPSRFSGSGSGQDYSLTISSLEYEDMGIYYCLQYDEFPPTFGAGAKLELKR | | |
| NIVMTQSPKSMSMSVGERVTLSCKASENVVTYVSWYQQKPEQSPKLLIYGASNRYT | 60 | 571 |
| GVPDRFTGSGSATDFTLTISSVQAEDLADYHCGQSYSYPFTFGSGTKLEIKR | | |
| NIVMTQSPKSMSMSVGERVTLSCKASENVVTYVSWYQQKPEQSPKLLIYGASNRYT | 61 | 572 |
| GVPDRFTGSGSATDFTLTISSVQAEDLADYHCGQSYSYPFTFGSGTKLEIKR | | |
| NIVMTQSPKSMSMSVGERVTLSCKASENVVTYVSWYQQKPEQSPKLLIYGASNRYT | 62 | 573 |
| GVPDRFTGSGSATDFTLTISSVQAEDLADYHCGQSYSYPFTFGSGTKLEIKR | | |
| NIVMTQSPKSMSMSVGERVTLSCKASENVVTYVSWYQQKPEQSPKLLIYGASNRYT | 63 | 574 |
| GVPDRFTGSGSATDFTLTISSVQAEDLADYHCGQSYSYPFTFGSGTKLEIKR | | |
| QIVLTQSPAIMSASPGEKVTMTCSASSSVSYMHWYQQKSGTSPKRWIYDTSKLASG | 64 | 575 |
| VPARFSGSGSGTSYSLTISSMEAEDAATYYCQQWSSNPLYTFGGGTKLEIKR | | |
| QIVLTQSPAIMSASPGEKVTMTCSASSSVSYMHWFQQKSGTSPKRWIYDTSKLASG | 65 | 576 |
| VPARFSGSGSGTSYSLTFSSMEAEDAATYYCQQWSSNPLYTFGGGTKLEIKR | | |
| DIVLTQSPASLAVSLGQRATISCKASQSVDYDGDSYMNWYQQKPGQPPKLLIYAAS | 66 | 577 |
| NLESGIPARFSGSGSGTDFTLNIHPVEEEDAATYYCQQSNEDPLTFGAGTKLELKR | | |
| DIVLTQSPASLAVSLGQRATISCKASQSVDYDGDSYMNWYQQKPGQPPKLLIYAAS | 67 | 578 |
| NLESGIPARFSGSGSGTDFTLNIHPVEEEDAATYYCQQSNEDPLTFGAGTKLELKR | | |
| DIVLTQSPASLAVSLGQRATISCKASQSVDYDGDSYMNWYQQKPGQPPQLLIYAAS | 68 | 579 |
| NLQSGIPARFSGSGSGTDFTLNIHPVEEEDAATYYCQQSNEDPLTFGAGTKLELKR | | |
| DIVLTQSPASLAVSLGQRATISCKASQSVDYDGDSYMNWYQQKPGQPPKLLIYAAS | 69 | 580 |
| NLESGIPARFGGSGSGTDFTLNIHPVEEEDAATYYCQQSNEDPLTFGAGTKLELKR | | |
| EIQMTQSPSSMSASLGDRITITCQATQDIVKNLNWYQQKPGKPPSFLIYYATELAEG | 70 | 581 |
| VPSRFSGSGSGSDYSLTISNLESEDFADYYCLQFYEFPLTFGAGTKLELKR | | |
| DIVLTQSPASLAVSLGQRATISCKASQSVDYDGDSYMNWYQQKPGQPPKLLIYAAS | 71 | 582 |
| NLESGIPARFSGSGSGTDFTLNIHPVEEEDAATYYCQQSNKDPLTFGAGTKLELKR | | |
| DIVLTQSPASLAVSLGQRATISCKASQSVDYDGDSYMNWYQQKPGQPPKLLIYAAS | 72 | 583 |
| NLESGIPARFSGSGSGTDFTLNIHPVEEEDAATYYCQQSNKDPLTFGAGTKLELKR | | |
| DIVLTQSPASLAVSLGQRATISCKASQSVDYDGDSYMNWYQQKPGQPPKLLIYAAS | 73 | 584 |
| NLESGIPARFSGSGSGTDFTLNIHPVEEEDAATYYCQQSNEDPLTFGAGTKLELKR | | |
| DIVLTQSPASLAVSLGQRATISCKASQSVDYDGDSYMNWYQQKPGQPPKLLIYAAS | 74 | 585 |
| NLESGIPARFSGSGSGTDFTLNIHPVEEEDAATYYCQQSNKDPFTFGAGTKLELKR | | |
| DIVLTQSPSSLAVSLGQRATISCKASQSVDYDGDSYMNWYQQKPGQPPKLLIYAAS | 75 | 586 |
| NLESGIPARFSGSGSGTDFTLTIHPVEEEDAATYYCQQSNKDPFTFGGGTKLELKR | | |
| DIVLTQSPASLAVSLGQRATISCKASQSVDYDGDSYMNWYQQKPGQPPKLLIYAAS | 76 | 587 |
| NLESGIPARFSGSGSGTDFTLNIHPVEEEDAATYYCQQSNKDPFTFGAGTKLELKR | | |
| DIVLTQSPASLAVSLGQRATISCRASQSVSTSSYSYMHWYQQKPGQAPKLLIKYASN | 77 | 588 |
| LESGVPARFSGSGSGTDFTLNIHPVEEEDTATYYCQHSWEIPLTFGAGAKLELKR | | |
| DIVLTQSPASLAVSLGQRATISCRASQSVSTSSYSYMHWYQQKPGQPPKLLIKYASN | 78 | 589 |
| LESGVPARFSGSGSGTDFTLNVHPVEEEDTATYYCQHSWEIPLTFGAGTKLELKR | | |
| DIVLTQSPASLAVSLGQRATISCRASQSVSTSSYSYMHWYQQKPGQPPKLLIKYASN | 79 | 590 |
| LESGVPARFSGSGSGTDFTLNIHPVEEEDTATYYCQHSWEIPLTFGAGTKLELKR | | |
| QAVVTQESALTTSPGGTVILTCRSSTGAVTTSNYANWVQEKPDHLFTGLIGGTSNR | 80 | 591 |
| APGVPVRFSGSLIGDKAALTITGAQTEDDAMYFCALWYSTHYVFGGGTKVTVLR | | |
| QAVVTQESALTTSPGGTVILTCRSSTGAVTTSNYANWVQEKPDHLFTGLIGGTSNR | 81 | 592 |
| APGVPVRFSGSLIGDKAALTITGAQTEDDAMYFCALWYSTHYVFGGGTKVTVLR | | |
| QAVVTQESALTTSPGGTVILTCRSSTGAVTTSNYANWVQEKPDHLFTGLIGGTSNR | 82 | 593 |
| APGVPVRFSGSLIGDKAALTITGAQTEDDAMYFCALWYSTHYVFGGGTKVTVLR | | |
| DIVLTQSPASLAVSLGQRATISCKASQSVDYDGDSYMNWYQQKPGQPPKLLIYAAS | 83 | 594 |
| NLESGIPARFSGSGSGTDFTLNIHPVEEEDAATYYCQQSNEDPLTFGAGTKLELKR | | |
| QAVVTQESALTTSPGGTVILTCRSSTGAVTTSNYANWVQEKPDHLFTGLIGGTSNR | 84 | 595 |
| APGVPVRFSGSLIGDKAALTITGAQTEDDAMYFCALWYSTHWVFGGGTKLTVLR | | |
| DIVMTQSPSSLAMSVGQKVTMSCKSSQSLLNSSNQKNYLAWYQQKPGQSPKLLVY | 85 | 596 |
| FASTRESGVPDRFIGSGSGTDFTLTISSVQAEDLADYFCQQHYSTPLTFGAGTKLELK | | |
| R | | |
| DIQMTQTTSSLSASLGDRVTISCRASQDISNYLNWYQQKPDGTVKLLIYYTSRLHSGV | 86 | 597 |
| PSRFSGSGSGTDYSLTISNLEQEDIATYFCQQDNTLPRTFGGGTKLEIKR | | |
| EIQMTQSPSSMSASLGDRITITCQATQDIVKNLNWYQQKPGKPPSFLIYYATELAEG | 87 | 598 |
| VPSRFSGSGSGSDYSLTISNLESEDFADYYCLQFYEFPYTFGGGTKLEIKR | | |
| DIVLTQSPASLAVSLGQRATISCKASQSVDYDGDSYMNWYRQKPGQPPKLLIYAAS | 88 | 599 |
| NLESGIPARFSGSGSGTDFTLNIHPVEEEDAATYYCQQSNEDPWTFGGGTKLEIKR | | |
| EIQMTQSPSSMSASLGDRITITCQATQDIVKNLNWYQQKPGKPPSFLIYYATELAEG | 89 | 600 |
| VPSRFSGSGSGSDYSLTISNLESEDFADYYCLQFYEFPLTFGAGTKLELKR | | |
| QIVLTQSPAIMSASPGEKVTITCSASSSVSYMHWFQQKPGTSPKLWIYSTSNLASGV | 90 | 601 |
| PARFSGSGSGTSYSLTISRMEAEDAATYYCQQRSSFPYTFGGGTKLEIKR | | |
| DIKMTQSPSSMYASLGERVTITCKASQDINSYLSWFQQKPGKSPKTLIYRANRLVDG | 91 | 602 |
| VPSRFSGSGSGQDYSLTISSLEYEDMGIYYCLQYDEFPLTFGAGTKLELKR | | |
| DIQMTQSPSSLSASLGERVSLTCRASQDIHGYLNLFQQKPGETIKHLIYETSNLDSGV | 92 | 603 |
| PKRFSGSRSGSDYSLIIGSLESEDFADYYCLQYASSPLTFGAGTKLELKR | | |
| DIVMTQSHKFMSTSVGDRVSITCKASQDVGTAVAWYQQKPGQSPKLLIYWASTRH | 93 | 604 |
| TGVPDRFTGSGSGTDFTLTISNVQSEDLADYFCQQYSSYPFTFGSGTKLEIKR | | |
| SIVMTQTPKFLLVSAGDRVTITCKASQSVSNDVAWYQQKPGQSPKLLIYYASNRYTG | 94 | 605 |
| VPDRFTGSGYGTDFTFTISTVQAEDLAVYFCQQDYTSLPTFGAGTKLEIKR | | |
| ETTVTQSPASLSVATGEKVTIRCITSTDIDDDMNWYQQKPGEPPKLLISEGNTLRPG | 95 | 606 |
| VPSRFSSSGYGTDFVFTIENTLSEDVADYYCLQSDNMPLTFGAGTKLELKR | | |
| DIQMTQTTSSLSASLGDRVTISCRASQDISNYLNWYQQKPDGTVKLLIYYTSRLHSGV | 96 | 607 |
| PSRFSGSGSGTDYSLTISNLEQEDIATYFCQQGNTLPFTFGSGTKLEIKR | | |
| DIQMTQTTSSLSASLGDRVTISCSASQGISNYLNWYQQKPDGTVKLLIYYTSSLHSGV | 97 | 608 |
| PSRFSGSGSGTDYSLTISNLEPEDIATYYCQQYSKLPYTFGGGTKLEIKR | | |
| DIVMTQSPATLSVTPGDRVSLSCRASQSISDYLHWYQQKSHESPRLLIKYASQSISGIP | 98 | 609 |
| SRFSGSGSGSDFTLSINSVEPEDVGVYYCQNGHSFPWTFGGGTKLEIKR | | |
| EIQMTQSPSSMSASLGDRITITCQATQDIVKNLNWYQQKPGKPPSFLIYYATELAEG | 99 | 610 |
| VPSRFSGSGSGSDYTLTISNLESEDFATYYCLQFYEFPYTFGGGTKLEIKR | | |
| EIQMTQSPSSMSASLGDRITITCQATQDIVKNLNWYQQKPGKPPSFLIYYATELAEG | 100 | 611 |
| VPSRFSGSGSGSDYSLTISNLESEDFADYYCLQFYEFPYTFGGGTKLEIKR | | |
| DIQMTQSPASLSASVGETVTITCRASGNIHNYLAWYQQKQGKSPQLLVYNAKTLAD | 101 | 612 |
| GVPSRFSGSGSGTQYSLKINSLQPEDFGSYYCQHFWSTPWTFGGGTKLEIKR | | |
| QAVVTQESALTTSPGGTVILTCRSSTGAVTTSNYANWVQEKPDHLFTGLIGGTSYRA | 102 | 613 |
| PGVPVRFSGSLIGDKAALTITGAQTEDDAMYFCALWYSTHYVFGGGTKVTVLR | | |
| DIQMTQSPSSLSASLGERVSLTCRASQEISGYLSWLQQKPDGTIKRLIYAASTLDSGV | 103 | 614 |
| PKRFSGSRSGSDYSLTISSLESEDFADYYCLQYASYPWTFGGGTKLEIKR | | |
| DIVMTQSPATLSVTPGDRVSLSCRASQSISDYLHWYQQKSHESPRLLIKYASQSISGIP | 104 | 615 |
| SRFSGSGSGSDFTLSINSVEPEDVGVYYCQNGHSFPYTFGGGTKLEIKR | | |
| ENVLTQSPAIMSASLGEKVTMSCRASSSVNYMYWYQQKSDASPKLWIYYTSNLAP | 105 | 616 |
| GVPARFSGSGSGNSYSLTISSMEGEDAATYYCQQFTSSPSTFGCGTKLEIKR | | |
| ETTVTQSPASLSMAIGEKVTIRCITNTDIDDDMNWYQQKPGEPPKLLISEGNTLRPG | 106 | 617 |
| VPSRFSSSGYGTDFVFTIENMLSEDVADYYCLQSDNLPLTFGCGTKLELKR | | |
| QLVLTQSSSASFSLGASAKLTCTLSSQHSTYTIEWYQQQPLKPPKYVMELKKDGSHS | 107 | 618 |
| TGDGIPDRFSGSSSGADRYLSISNIQPEDEAIYICGVGDTIKEQFVYVFGCGTKVTVLG | | |
| QIVLTQSPAIMSASPGEKVTMTCSASSSVSYMHWYQQKSGTSPKRWIYDTSKLASG | 108 | 619 |
| VPARFSGSGSGTSYSLTISSMEAEDAATYYCQQWSSNPLTFGCGTKLELKR | | |
| DIKMTQSPSSMYASLGERVTITCKASQDINSYLSWFQQKPGKSPKTLIYRANRLVDG | 109 | 620 |
| VPSRFSGSGSGQDYSLTISSLEYEDMGIYYCLHYDEFPPTFGAGTKLELK | | |
| DIKMTQSPSSMYASLGERVTITCKASQDINSYLNWFQQKPGKSPKTLIYRANRLVDG | 110 | 621 |
| VPSRFSGSGSGQDYSLTISSLEYEDMGIYYCLQYDEFPPTFGAGTKLELK | | |
| DIKMTQSPSSMYASLGERVTITCKASQDINSYLSWFQQKPGKSPKTLIYRANRLVDG | 111 | 622 |
| VPSRFSGSGSGQDYSLTISSLEYEDMGIYYCLQYDEFPPTFGAGTKLELK | | |
| DIKMTQSPSSMYASLGERVTITCKASQDINSYLSWFQQKPGKSPKTLIYRANRLVDG | 112 | 623 |
| VPSRFSGSGSGQDYSLTISSLEYEDMGIYYCLQYDEFPPTFGAGTKLELK | | |
| DIKMTQSPSSMYASLGERVTITCKASQDINSYLSWFQQKPGKSPKTLIYRANRLVDG | 113 | 624 |
| VPSRFSGSGSGQDYSLTISSLEYEDMGIYYCPQYVESPPTFGAGTKLELK | | |
| DIKMTQSPSSMYASLGERVTITCKASQDINSYLSWFQQKPGKSPKTLIYRANRLVDG | 114 | 625 |
| VPSRFSGSGSGQDYSLTISSLEYEDMGIYYCLQYDEFPPTFGAGTKLELK | | |
| DIKMTQSPSSMYASLGERVTITCKASQDINSYLSWFQQKPGKSPKTLIYRANRLVDG | 115 | 626 |
| VPSRFSGSGSGQDYSLTISSLEYEDMGIYYCLQYDEFPPTFGAGTKLELK | | |
| DIKMTQSPSSMYASLGERVTITCKASQDINSYLSWFHQKPGKSPKTLIYRANRLVDG | 116 | 627 |
| VPSRFSGSGSGQDYSLTISSLEYEDMGIYYCLQYDEFPPTFGAGTKLELK | | |
| DIKMTQSPSSMYASLGERVTITCKASQDINSYLSWFQQKPGKSPKTLIYRANRLVDG | 117 | 628 |
| VPSRFSGSGSGQDYSLTISSLEYEDMGIYYCLQYDEFPLTFGGGTKLEIK | | |
| DIKMTQSPSSMYASLGERVTITCKASQDINGYLSWFQQKPGKSPQTLLYRANRLVD | 118 | 629 |
| GVPSRFRGSGSGQDYSLTISSLEYEDMGIYYCLQYDEFPPTFGAGTKLELK | | |
| DIKMTQSPSSMYASLGERVTITCKASQDINSYLSWFQQKPGKSPKTLIYRANRLVDG | 119 | 630 |
| VPSRFSGSGSGQDYSLTISSLEYEDMGIYYCLQYDEFPPTFGAGTKLELK | | |
| DIKMTQSPSSMYASLGERVTITCKASQDINSYLSWFQQKPGKSPKTLIYRANRLVDG | 120 | 631 |
| VPSRFSGSGSGQDYSLTISSLEYEDMGFYYCLQYDEFPPTFGAGTKLELK | | |
| DIKMTQSPSSIYASLGERVTITCKASQDINSYLNWFQQKPGKSPKTLIYRANRLVDGV | 121 | 632 |
| PSRFSGSGSGQDYSLTISSLEYEDMGIYYCLQYDEFPPTFGVGTKLELK | | |
| DIKMTQSPSSMYASLGERVTITCKASQDINSYLSWFQQKPGKSPKTLIYRANRLVDG | 122 | 633 |
| VPSRFSGSGSGQDYSLTISSLEYEDMGIYYCLQYDEFPPTFGAGTKLELK | | |
| DIKMTQSPSSMYASLGERVTITCKASQDINSYLSWFQQKPGKSPKTLIYRAKRLVDG | 123 | 634 |
| VPSRFSGSGSGQDYSLTISSLEYEDMGIYYCLQYDEFPPTFGAGTKLELK | | |
| DIKMTQSPSSMYASLGERVTITCKASQDINSYLSWFQQKPGKSPKTLIYRANRLVDG | 124 | 635 |
| VPSRFSGSGSGQDYSLTISSLEYEDMGIYYCLQYDEFPPTFGAGAKLELK | | |
| NIVMTQSPKSMSMSVGERVTLSCKASENVVTYVSWYQQKPEQSPKLLIYGASNRYT | 125 | 636 |
| GVPDRFTGSGSATDFTLTISSVQAEDLADYHCGQSYSYPFTFGSGTKLEIK | | |
| NIVMTQSPKSMSMSVGERVTLSCKASENVVTYVSWYQQKPEQSPKLLIYGASNRYT | 126 | 637 |
| GVPDRFTGSGSATDFTLTISSVQAEDLADYHCGQSYSYPFTFGSGTKLEIK | | |
| NIVMTQSPKSMSMSVGERVTLSCKASENVVTYVSWYQQKPEQSPKLLIYGASNRYT | 127 | 638 |
| GVPDRFTGSGSATDFTLTISSVQAEDLADYHCGQSYSYPFTFGSGTKLEIK | | |
| NIVMTQSPKSMSMSVGERVTLSCKASENVVTYVSWYQQKPEQSPKLLIYGASNRYT | 128 | 639 |
| GVPDRFTGSGSATDFTLTISSVQAEDLADYHCGQSYSYPFTFGSGTKLEIK | | |
| NIVMTQSPKSMSMSVGERVTLSCKASENVVTYVSWYQQKPEQSPKLLIYGASNRYT | 129 | 640 |
| GVPDRFTGSGSATDFTLTISSVQAEDLADYHCGQSYSYLIHVRFGSGTKLEIK | | |
| NIVMTQSPKSMSMSVGERVTLSCKASENVVTYVSWYQQKPEQSPKLLIYGASNRYT | 130 | 64: |
| GVPDRFTGSGSATDFTLTISSVQAEDLADYHCGQSYSYLIHVRFGSGTKLEIK | | |
| QIVLTQSPAIMSASPGEKVTMTCSASSSVSYMHWYQQKSGTSPKRWIYDTSKLASG | 131 | 642 |
| VPARFSGSGSGTSYSLTISSMEAEDAATYYCQQWSSNPLYTFGGGTKLEIK | | |
| QIVLTQSPAIMSASPGEKVTMTCSASSSVSYMHWYQQKSGTSPKRWIYDTSKLASG | 132 | 643 |
| VPARFSGSGSGTSYSLTISSMEAEDAATYYCQQWSSNPHVHVFGGGTKLEIK | | |
| QIVLTQSPAIMSASPGEKVTMTCSASSSVSYMHWYQQKSGTSPKRWIYDTSKLASG | 133 | 644 |
| VPARFSGSGSGTSYSLTISSMEAEDAATYYCQQWSSNPLYTFGGGTKLEIK | | |
| QIVLTQSPAIMSASPGEKVTMTCSASSSVSYMHWYQQKSGTSPKRWIYDTSKLASG | 134 | 645 |
| VPARFSGSGSGTSYSLTISSMEAEDAATYYCQQWSSNPLYTFGGGTKLEIK | | |
| DIVLTQSPASLAVSLGQRATISCKASQSVDYDGDSYMNWYQQKPGQPPKLLIYAAS | 135 | 646 |
| NLESGIPARFSGSGSGTDFTLNIHPVEEEDAATYYCQQSNEDPLTFGAGTKLELK | | |
| DIVLTQSPASLAVSLGQRATISCKASQSVDYDGDSYMNWYQQKPGQPPKLLIYAAS | 136 | 647 |
| NLESGIPARFSGSGSGTDFTLNIHPVEEEDAATYYCQQSNEDPLTFGAGTKLELK | | |
| DIVLTQSPASLAVSLGQRATISCKASQSVDYDGDSYMNWYQQKPGQPPQLLIYAAS | 137 | 648 |
| NLQSGIPARFSGSGSGTDFTLNIHPVEEEDAATYYCQQSNEDPLTFGAGTKLELK | | |
| DIVLTQSPASLAVSLGQRATISCKASQSVDYDGDSYMNWYQQKPGQPPKLLIYAAS | 138 | 649 |
| NLESGIPARFGGSGSGTDFTLNIHPVEEEDAATYYCQQSNEDPLTFGAGTKLELK | | |
| DIQMTQSPSSLSASLGGKVTITCKASQDINKYIAWYQHKPGKGPRLLIHYTSTLQPGI | 139 | 650 |
| PSRFSGSGSGRDYSFSISNLEPEDIATYYCLQYDILMYTFGGGTKLEIK | | |
| DIQMTQSPSSLSASLGGKVTITCKASQDINKYIAWYQHKPGKGPRLLIHYTSTLQPGI | 140 | 651 |
| PSRFSGSGSGRDYSFSISNLEPEDIATYYCLQYDILMYTFGGGTKLEIK | | |
| EIQMTQSPSSMSASLGDRITITCQATQDIVKNLNWYQQKPGKPPSFLIYYATELAEG | 141 | 652 |
| VPSRFSGSGSGSDYSLTISNLESEDFADYYCLQFYEFPLTFGAGTKLELK | | |
| EIQMTQSPSSMSASLGDRITITCQATQDIVKNLNWYQQKPGKPPSFLIYYATELAEG | 142 | 653 |
| VPSRFSGSGSGSDYSLTISNLESEDFADYYCLQFYEFPLTFGAGTKLELK | | |
| EIQMTQSPSSMSASLGDRITITCQATQDIVKNLNWYQQKPGKPPSFLIYYATELAEG | 143 | 654 |
| VPSRFSGSGSGSDYSLTISNLESEDFADYYCLQFYEFPLTFGAGTKLELK | | |
| ENVLTQSPAIMSASLGEKVTMSCRASSSVNYMYWYQQKSDASPKLWIYYTSNLAP | 144 | 655 |
| GVPARFSGSGSGNSYSLTISSMEGEDAATYYCQQFTSSHTFGGGTKLEIK | | |
| ENVLTQSPAIMSASLGEKVTMSCRASSSVNYMYWYQQKSDASPKLWIYYTSNLAP | 145 | 656 |
| GVPARFSGSGSGNSYSLTISSMEGEDAATYYCQQFTSSHTFGGGTKLEIK | | |
| DIVLTQSPASLAVSLGQRATISCKASQSVDYDGDSYMNWYQQKPGQPPKLLIYAAS | 146 | 657 |
| NLESGIPARFSGSGSGTDFTLNIHPVEEEDAATYYCQQSNKDPLTFGAGTKLELK | | |
| DIVLTQSPASLAVSLGQRATISCKASQSVDYDGDSYMNWYQQKPGQPPKLLIYAAS | 147 | 658 |
| NLESGIPARFSGSGSGTDFTLNIHPVEEEDAATYYCQQSNEDPLTFGAGTKLELK | | |
| DIVLTQSPASLAVSLGQRATISCKASQSVDYDGDSYMNWYQQKPGQPPKLLIYAAS | 148 | 659 |
| NLESGIPARFSGSGSGTDFTLNIHPVEEEDAATYYCQQSNKDPFTFGAGTKLELK | | |
| DIVLTQSPASLAVSLGQRATISCRASQSVSTSSYSYMHWYQQKPGQAPKLLIKYASN | 149 | 660 |
| LESGVPARFSGSGSGTDFTLNIHPVEEEDTATYYCQHSWEIPLTFGAGAKLELK | | |
| DIVLTQSPASLAVSLGQRATISCRASQSVSTSSYSYMHWYQQKPGQPPKLLIKYASN | 150 | 661 |
| LESGVPARFSGSGSGTDFTLNVHPVEEEDTATYYCQHSWEIPLTFGAGTKLELK | | |
| DIQMTQTPSSLSASLGDRVTISCRASQDISNYLNWYQQKPDGTVKLLIYSTSRLHSGV | 151 | 662 |
| PSRFSGSGSGTDYSLTISNLEQEDIATYFCQQGNTLPWTFGGGTKLEIK | | |
| DIQMTQTPSSLSASLGDRVTISCRASQDISNYLNWYQQKPDGTVKLLIYSTSRLHSGV | 152 | 663 |
| PSRFSGSGSGTDYSLTISNLEQEDIATYFCQQGNALPWTFGGGTKLEIK | | |
| DIQMTQTPSSLSASLGDRVTISCRASQDISNYLNWYQQKPDGTVKLLIYSTSRLHSGV | 153 | 664 |
| PSRFSGSGSGTDYSLTISNLEQEDIATYFCQQGNTLPWTFGGGTKLEIK | | |
| QAVVTQESALTTSPGGTVILTCRSSTGAVTTSNYANWVQEKPDHLFTGLIGGTSNR | 154 | 665 |
| APGVPVRFSGSLIGDKAALTITGAQTEDDAMYFCALWYSTHYVFGGGTKVTVL | | |
| QAVVTQESALTTSPGGTVILTCRSSTGAVTTSNYANWVQEKPDHLFTGLIGGTSNR | 155 | 666 |
| APGVPVRFSGSLIGDKAALTITGAQTEDDAMYFCALWYSTHYVFGGGTKVTVL | | |
| QAVVTQESALTTSPGGTVILTCRSSTGAVTTSNYANWVQEKPDHLFTGLIGGTSNR | 156 | 667 |
| APGVPVRFSGSLIGDKAALTITGAQTEDDAMYFCALWYSTHYVFGGGTKVTVL | | |
| ETTVTQSPASLSVATGEKVTIRCITSTDIDDDMNWYQQKPGEPPKLLISEGNTLRPG | 157 | 668 |
| VPSRFSSSGYGTDFVFTIENTLSEDVADYYCLQSDNMPFTFGSGTKLEIK | | |
| QAVVTQESALTTSPGGTVILTCRSSTGAVTTSNYANWVQEKPDHLFTGLIGGTSNR | 158 | 669 |
| APGVPVRFSGSLIGDKAALTITGAQTEDDAMYFCALWYSTHYFGGGTKVTVL | | |
| DIVLTQSPASLAVSLGQRATISCKASQSVDYDGDSYMNWYQQKPGQPPKLLIYAAS | 159 | 670 |
| NLESGIPARFSGSGSGTDFTLNIHPVEEEDAATYYCQQSNEDPLTFGAGTKLELK | | |
| DIVMSQSPSSLAVSVGEKVTMSCKSSQSLLYSTNQKNYLAWYQQKPGQSPKLLIYW | 160 | 671 |
| ASTRESGVPDRFTGSGSGTDFTLTISSVKAEDLAVYYCQQYYSYPPWTFGGGTKLEIK | | |
| DIVLTQSPASLAVSLGQRATISCKASQSVDYDGDSYMNWYQQKPGQPPKLLIYAAS | 161 | 672 |
| NLESGIPARFSGSGSGTDFTLNIHPVEEEDAATYYCQQSNEDPPTFGGGTKLEIK | | |
| DIQMTQSPASLAASVGETVTITCRASENIYYSLAWYQQKQGKSPQLLIYNANSLEDG | 162 | 673 |
| VPSRFSGSGSGTQYSMKINSMQPEDTATYFCKQAYDVPYTFGGGTKLEIK | | |
| DIQMTQTTSSLSASLGDRVTISCRASQDISNYLNWYQQKPDGTVKLLIYYTSRLHSGV | 163 | 674 |
| PSRFSGSGSGTDYSLTISNLEQEDIATYFCQQDNTLPRTFGGGTKLEIK | | |
| DIQMTQTTSSLSASLGDRVTISCRASQDISNYLNWYQQKPDGTVKLLIYYTSRLHSGV | 164 | 675 |
| PSRFSGSGSGTDYSLTISNLEQEDIATYFCQQGNTLPWTFGGGTKLEIK | | |
| DIQMTQSPASLSVSVGETVTITCRASENIYSNLAWYQQKQGKSPQLLVYAATNLAD | 165 | 676 |
| GVPSRFSGSGSGTQYSLKINSLQSEDFGSYYCQHFWGTPWTFGGGTKLEIK | | |
| DIVLTQSPASLAVSLGQRATISCKASQSVDYDGDSYMNWYRQKPGQPPKLLIYAAS | 166 | 677 |
| NLESGIPARFSGSGSGTDFTLNIHPVEEEDAATYYCQQSNEDPWTFGGGTKLEIK | | |
| QAVVTQESALTTSPGETVTLTCRSSTGAVTTSNYANWVQEKPDHLFTGLIGGTNNR | 167 | 678 |
| APGVPARFSGSLIGDKAALTITGAQTEDEAIYFCALWYSNHWVFGGGTKLTVL | | |
| EIQMTQSPSSMSASLGDRITITCQATQDIVKNLNWYQQKPGKPPSFLIYYATELAEG | 168 | 679 |
| VPSRFSGSGSGSDYSLTISNLESEDFADYYCLQFYEFPLTFGAGTKLELK | | |
| QLVLTQSSSASFSLGASAKLTCTLSSQHSTYTIEWYQQQPLKPPKYVMELKKDGSHS | 169 | 680 |
| TGDGIPDRFSGSSSGADRYLSISNIQPEDEAIYICGVGDTIKEQFVFVFGGGTKVTVL | | |
| DIVLTQSPASLAVSLGQRATISCKASQSVDYDGDSYMNWYQQKPGQPPKLLIYAAS | 170 | 681 |
| NLESGIPARFSGSGSGTDFTLNIHPVEEEDAATYYCQQSNEDPPTFGGGTKLEIK | | |
| DIQMTQSPSSLSASLGERVSLTCRASQDIGISLNWLQQEPDGTIKRLIYATSSLDSGV | 171 | 682 |
| PKRFSGSRSGSDYSLTISSLESEDFVDYYCLQYASSPYTFGGGTKLEIK | | |
| DIQMTQSPASLSASVGETVTITCRASENIYSYLAWYQQKQGKSPQLLVYNAKNLAD | 172 | 683 |
| GVPSRFSGSGSGTQYSLKINSLQSEDFGYYCQHFWGTPYTFGGGTKLEIK | | |
| DIKMTQSPSSMYASLGERVTITCKASQDINSYLSWFQQKPGKSPKTLIYRANRLVDG | 173 | 684 |
| VPSRFSGSGSGQDYSLTISSLEYEDMGIYYCLQYDEFPLTFGAGTKLELK | | |
| DIQMTQSPSSLSASLGERVSLTCRASQDIHGYLNLFQQKPGETIKHLIYETSNLDSGV | 174 | 685 |
| PKRFSGSRSGSDYSLIIGSLESEDFADYYCLQYASSPLTFGAGTKLELK | | |
| DIVMTQSHKFMSTSVGDRVSITCKASQDVGTAVAWYQQKPGQSPKLLIYWASTRH | 175 | 686 |
| TGVPDRFTGSGSGTDFTLTISNVQSEDLADYFCQQYSSYPFTFGSGTKLEIK | | |
| QAVVTQESALTTSPGETVTLTCRSSTGAVTTSNYANWVQEKPDHLFTGLIGGTNNR | 176 | 687 |
| APGVPARFSGSLIGDKAALTITGAQTEDEAIYFCALWYSNHLVFGGGTKLTVL | | |
| DIVLTQSPASLAVSLGQRATISCKASQSVDYDGDSYMNWYQQKPGQPPKLLIYVAS | 177 | 688 |
| NLESGIPARFRGSGSGTDFTLNIHPVEEEDAAIYYCQQSHEDPRTFGGGTKLEIK | | |
| ENVLTQSPAIMSASPGEKVTMTCSASSSVSYMHWYQQKSSTSPKLWIYDTSKLASG | 178 | 689 |
| VPGRFSGSGSGNSYSLTISSMEAEDVATYYCFQGSGYPLTFGAGTKLELK | | |
| DIQMTQSPASLSVSVGETVTITCRASENIYSNLAWYQQKQGKSPQLLVYAATNLAD | 179 | 690 |
| GVPSRFSGSGSGTQYSLKINSLQSEDFGSYYCQHFWGTPYTFGGGTKLEIK | | |
| ETTVTQSPASLSVATGEKVTIRCITSTDIDDDMNWYQQKPGEPPKLLISEGNTLRPG | 180 | 691 |
| VPSRFSSSGYGTDFVFTIENTLSEDVADYYCLQSDNMPLTFGAGTKLELK | | |
| DIQMTQTTSSLSASLGDRVTISCRASQDISNYLNWYQQKPDGTVKLLIYYTSRLHSGV | 181 | 692 |
| PSRFSGSGSGTDYSLTISNLEQEDIATYFCQQGNTLPFTFGSGTKLEIK | | |
| DIQMTQTTSSLSASLGDRVTISCSASQGISNYLNWYQQKPDGTVKLLIYYTSSLHSGV | 182 | 693 |
| PSRFSGSGSGTDYSLTISNLEPEDIATYYCQQYSKLPYTFGGGTKLEIK | | |
| DIVMTQSPATLSVTPGDRVSLSCRASQSISDYLHWYQQKSHESPRLLIKYASQSISGIP | 183 | 694 |
| SRFSGSGSGSDFTLSINSVEPEDVGVYYCQNGHSFPWTFGGGTKLEIK | | |
| QAVVTQESALTTSPGGTVILTCRSSTGAVTTSNYANWVQEKPDHLFTGLIGGTSYRA | 184 | 695 |
| PGVPVRFSGSLIGDKAALTITGAQTEDDAMYFCALWYSTHYVFGGGTKVTVL | | |
| DIQMTQSPSSLSASLGERVSLTCRASQEISGYLSWLQQKPDGTIKRLIYAASTLDSGV | 185 | 696 |
| PKRFSGSRSGSDYSLTISSLESEDFADYYCLQYASYPWTFGGGTKLEIK | | |
| DIVLTQSPASLAVSLGQRATISCKASQSVDYDGDSYMNWYQQKPGQPPKLLIYAAS | 186 | 697 |
| NLESGIPARFSGSGSGTDFTLNIHPVEEEDAATYYCQQSNEDPLPTFGAGTQRELK | | |
| QIVLTQSPAIMSASPGEKVTMTCSASSSVSYMHWYQQKSGTSPKRWIYDTSKLASG | 187 | 698 |
| VPVRFSGSGSGTSYSLTISSMEAEDAATYYCQQWSSNPLTFGAGTKLELK | | |
| DIQMTQSPASLSASVGETVTITCRASGNIHNYLAWYQQKQGKSPQLLVYNAKTLAD | 188 | 699 |
| GVPSRFSGSGSGTQYSLKINSLQPEDFGSYYCQHFWSTPWTFGGGTKLEIK | | |
| DIQMTQSPASLSASVGETVTITCRASENIYSYLAWYQQKQGKSPQLLVYNAKTLAEG | 189 | 700 |
| VPSRFSGSGSGTQFSLKINSLQPEDFGSYYCQHHYGTPFTFGSGTKLEIK | | |
| ENVLTQSPAIMSASLGEKVTMSCRASSSVNYMYWSQQKSDASPKLWIYYTSNLAP | 190 | 701 |
| GVPPRFSGSGSGNSYSLTISSMEGEDAATYYCQQFTSSLTFGAGTKLELK | | |
| QAVVTQESALTTSPGETVTLTCRSSTGAVTTSNYANWVQEKPDHLFTGLIGSTNNR | 191 | 702 |
| APGVPARFSGSLIGDKSALTITGAQTEDEAIYFCTLWYSNHWVFGGGTKLTVL | | |
| DIVMTQSHKFMSTSVGDRVSITCKASQDVGTAVAWYQQKPGQSPKLLIYWASTRH | 192 | 703 |
| TGVPDRFTGSGSGTDFTLTISNVQSEDLADYFCQQYSSYPFTFGSGTKLEIK | | |
| DIKMTQSPSSMYASLGERVTITCKASQDINSYLSWFQQKPGKSPKTLIYRANRLVDG | 193 | 704 |
| VPSRFSGSGSGQDYSLTISSLEYEDMGIYYCLQYDEFPPTFGAGTKLELK | | |
| DIQMTQSPASLSVSVGETVTITCRASENIYSNLAWYQQKQGKSPQLLVYAATNLAD | 194 | 705 |
| GVPSRFSGSGSGTQYSLKINSLQSEDFGSYYCQHFWGTPFTFGSGTKLEIK | | |
| DIVMTQSPATLSVTPGDRVSLSCRASQSISDYLHWYQQKSHESPRLLIKYASQSISGIP | 195 | 706 |
| SRFSGSGSGSDFTLSINSVEPEDVGVYYCQNGHSFPYTFGGGTKLEIK | | |
| QAVVTQESALTTSPGETVTLTCRSSTGAVTTSNYANWVQEKPDHLFTGLIGGTNNR | 196 | 707 |
| APGVPARFSGSLIGDKAALTITGAQTEDEAIYFCALWYSNHWVFGGGTKLTVL | | |
| EIFVTQSPASLSMAIGEKVTIRCITSTDIDDDMNWYQQKPGEPPKLLISEGNTLRPGV | 197 | 708 |
| PSRFSSSGYGTDFVFTIENMLSEDVADYYCLQSDNLPLTFGAGTKLELK | | |
| QIVLTQSPAIMSASPGEKVTITCSASSSVSYMHWFQQKPGTSPKLWIYSTSNLASGV | 198 | 709 |
| PARFSGSGSGTSYSLTISRMEAEDAATYYCQQRSSYPPTFGSGTKLELK | | |
| QIVLTQSPAIMSASPGEKVTMTCSASSSVSYMHWYQQKSGTSPKRWIYDTSKLASG | 199 | 710 |
| VPARFSGSGSGTSYSLTISSMEAEDAATYYCQQWSSNPLTFGSGTKLEIK | | |
| QIVLTQSPAIMSASPGEKVTLTCSASSSVSSSYLYWYQQKPGSSPKLWIYSTSNLASG | 200 | 711 |
| VPARFSGSGSGTSYSLTISSMEAEDAASYFCHQWSSYPPTFGAGTKLELKR | | |
| QLVLTQSSSASFSLGASAKLTCTLSSQHSTYTIEWYQQQPLKPPKYVMELKKDGSHS | 201 | 712 |
| TGDGIPDRFSGSSSGADRYLSISNIQPEDEAIYICGVGDTIKEQFVYVFGGGTKVTVLR | | |
| DVLMTQTPLSLPVSLGDQASISCRSSQSIVHSNGNTYLEWYLQKPGQSPKLLIYKVSN | 202 | 713 |
| RFSGVPDRFSGSGSGTDFTLKISRVEAEDLGVYYCFQGSHVPWTFGGGTKLEIKR | | |
| DIKMTQSPSSMYASLGERVTITCKASQDINSYLSWFQQKPGKSPKTLIYRANRLVDG | 203 | 714 |
| VPSRFSGSGSGQDYSLTISSLEYEDMGIYYCLQYDEFPPTFGAGTKLELKR | | |
| DVVMTQTPLTLSVTIGQPASISCKSSQSLLDSDGKTYLNWLLQRPGQSPKRLIYLVSK | 204 | 715 |
| LDSGVPDRFTGSGSGTDFTLKISRVEAEDLGVYYCWQGTHFPWTFGGGTKLEIKR | | |
| QIVLTQSPAIMSASPGEKVTLPCSASSSVSSSYLYWYQQKPGSSPKLWIYSTSNLASG | 205 | 716 |
| VPARFSGSGSGTSYSLTISSMEAEDAASYFCHQWSSYPPTFGAGTKLELKR | | |
| DVLMTQTPLSLPVSLGDQASISCRSSQSIVYSNGNTYLEWYLQKPGQSPKLLIYKVSN | 206 | 717 |
| RFSGVPDRFSGSGSGTDFTLKISRVEAEDLGVYYCFQGSHVPPTFGGGTKLEIKR | | |
| DIQMTQSPASLSVSVGETVTITCRASENIYNNLAWYQQKQGKSPQLLVYAATNLAD | 207 | 718 |
| GVPSRFSGSGSGTQYSLKINSLQSEDFGSYYCQHFWGTPWTFGGGTKLEIKR | | |
| QIVLTQSPAIMSASPGEKVTLTCSASSSVSSSYLYWYQQKPGSSPKLWIYSTSNLASG | 208 | 719 |
| VPARFSGSGSGTSYSLTISSMEAEDAASYFCHQWSSYPPTFGAGTKLELKR | | |
| QIVLTQSPAIMSASPGEKVTMTCSASSSVSYMYWYQQKPGSSPRLLIYDTSNLASGV | 209 | 720 |
| PVRFSGSGSGTSYSLTISRMEAEDAATYYCQQWSTYPPITFGAGTKLELKR | | |
| QIVLTQSPAIMSASPGEKVTMTCSASSSVSYMYWYQQKPGSSPRLLIYDTSNLASGV | 210 | 721 |
| PVRFSGSGSGTSYSLTISRMEAEDAATYYCQQWSSYPFTFGSGTKLEIKR | | |
| QIVLSQSPAILSASPGEKVTMTCRASSSVSYMHWYQQKPGSSPKPWIYATSNLASG | 211 | 722 |
| VPARFSGSGSGTSYSLTISRVEAEDAATYYCQQWSSNPYTFGGGTKLEIKR | | |
| DIQMTQSPASLSVSVGETVTITCRASENIYSNLAWYQQKQGKSPQLLVYAATNLAD | 212 | 723 |
| GVPSRFSGSGSGTQYSLKINSLQSEDFGSYYCQHFWGTPWTFGGGTKLEIKR | | |
| DIVMTQSHKFMSTSVGDRVSITCKASQDVSTAVAWYQQKPGQSPKLLIYWASTRH | 213 | 724 |
| TGVPDRFTGSGSGTDYTLTISSVQAEDLALYYCQQHYSTPWTFGGGTKLEIKR | | |
| DVVMTQTPLTLSVTIGQPASISCKSSQSLLDSDGKTYLNWLLQRPGQSPKRLIYLVSK | 214 | 725 |
| LDSGVPDRFTGSGSGTDFTLKISRVEAEDLGVYYCWQGTHFPWTFGGGTKLEIKR | | |
| DVLMTQTPLSLPVSLGDQASISCRSSQSIVHSNGNTYLEWYLQKPGQSPKFLIYKVS | 215 | 726 |
| NRFSGVPDRFSGSGSGTDFTLKISRVEAEDLGVYYCFQGSHVPPTFGGGTKLEIKR | | |
| ETTVTQSPASLSVATGEKVTIRCITSTDIDDDMNWYQQKPGEPPKLLISEGNTLRPG | 216 | 727 |
| VPSRFSSSGYGTDFVFTIENTLSEDVADYYCLQSDNMPLTFGGGTKLEIKR | | |
| DIQMTQSPSSLSASLGGKVTITCKASQDINKYIAWYQHKPGKGPRLLIHYTSTLQPGI | 217 | 728 |
| PSRFSGSGSGRDYSFSISNLEPEDIATYYCLQYDNLYMYTFGGGTKLEIKR | | |
| DIQMNQSPSSLSASLGDTITITCHASQNINVWLSWYQQKPGNIPKLLIYKASNLHTG | 218 | 72 |
| VPSRFSGSGSGTGFTLTISSLQPEDIATYYCQQGQSYPYTFGGGTKLEIKR | | |
| QIVLTQSPALMSASPGEKVTMTCSASSSVSYMYWYQQKPRSSPKPWIYLTSNLASG | 219 | 730 |
| VPARFSGSGSGTSYSLTISSMEAEDAATYYCQQWSSNPPTFGGGTKLEIKR | | |
| DVVMTQTPLTLSVTIGQPASISCKSSQSLLDSDGKTYLNWLLQRPGQSPKRLIYLVSK | 220 | 731 |
| LDSGVPDRFTGSGSGTDFTLKISRVEAEDLGFYYCWQGTHFPWTFGGGTKLEIKR | | |
| QIVLTQSPAIMSASPGEKVTMTCSASLSVSDMYWYQQKPGSSPRLLIYDTSNLASGV | 221 | 732 |
| PVRFSGSGSGTSYSLTISRMEAEDAATYYCQQWSSYPFTFGSGTKLEIKR | | |
| QIVLTQSPAIMSASPGEKVTLTCSASSSVSSSYLYWYQQRPGSSPKLWIYSTSNLASG | 222 | 733 |
| VPARFSGSGSGTSYSLTISSMEAEDAASYFCHQWSSYPPTFGAGTKLELKR | | |
| ENVLTQSPAIMSASLGEKVTMSCRASSSVNYMYWYQQKSDASPKLWIYYTSNLAP | 223 | 734 |
| GVPARFSGSGSGNSYSLTISSMEGEDAATYYCQQFTSSPSTFGGGTKLEIKR | | |
| ETTVTQSPASLSMAIGEKVTIRCITNTDIDDDMNWYQQKPGEPPKLLISEGNTLRPG | 224 | 735 |
| VPSRFSSSGYGTDFVFTIENMLSEDVADYYCLQSDNLPLTFGAGTKLELKR | | |
| DIVLTQSPASLAVSLGQRATISCKASQSVDYDGDSYMNWYQQKPGQPPKLLIYAAS | 225 | 736 |
| NLESGIPARFSGSGSGTDFTLNIHPVEEEDAATYYCQQSNEDPWTFGGGTKLEIKR | | |
| DIVLTQSPATLSVTPGDSVSLSCRASQSISNNLHWYQQKSHESPRLLIKYASQSISGIP | 226 | 737 |
| SRFSGSGSGTDFTLSINSVETEDFGMYFCQQSNSWPFTFGSGTKLEIKR | | |
| QIVLTQSPAIMSASPGEKVTLTCSASSSVSSSYLYWYQQKPGSSPKLWIYSTSNLASG | 227 | 738 |
| VPARFSGSGSGTSYSLTISSMEAEDAASYFCHQWSSYPPTFGGGTKLEIKR | | |
| ETTVTQSPASLSVATGEKVTIRCITSTDIDDDMNWYQQKPGEPPKLLISEGNTLRPG | 228 | 739 |
| VPSRFSSSGYGTDFVFTIENTLSEDVADYYCLQSDNMPLTFGAGTKLELKR | | |
| DVVMTQTPLTLSVTIGQPASISCKSSQSLLDSDGKTYLHWLLQRPGQSPKRLIYLVSK | 229 | 740 |
| LDSGVPDRFTGSGSGTDFTLKISRVEAEDLAVYYCWQGTHFPWTFGGGTKLEIKR | | |
| DIQMTQSPSSLSASLGGKVTITCKASQDINKYIAWYQHKPGKGPRLLIHYTSTLQPGI | 230 | 741 |
| PSRFSGSGSGRDYSFSISNLEPEDIATYYCLQYDNLRTFGGGTKLEIKR | | |
| QAVVTQESALTTSPGETVTLTCRSSTGAVTTSNYANWVQEKPDHLFTGLIVGTNNR | 231 | 742 |
| APGVPARFSGSLIGDKAALTITGAQTEDEAIYFCVLWYSNHLVFGGGTKLTVLG | | |
| NIVMTQSPKSMSMSVGERVTLSCKASENVGTYVSWYQQKPEQSPKLLIYGASNRYT | 232 | 743 |
| GVPDRFTGSGSATDFTLTISSVQAEDLADYHCGQSYSYPPTFGAGTKLELKR | | |
| DIVLTQSPASLAVSLGQRATISCRASETVDSYGYSFMHWYQQKPGQPPKLLIYRASN | 233 | 744 |
| LESGIPARFSGSGSRTDFTLTINPVEADDVATYYCQQSNEDPRTFGGGTKLEIKR | | |
| DIVMSQSPSSLAVSVGEKVTMSCKSSQSLLYSTNQKNYLAWYQQKPGQSPKLLLYW | 234 | 745 |
| ASTRESGVPDRFTGSGSGTDFTLTINSVKAEDLAVYYCQQYYSYRTFGGGTKLEIKR | | |
| DVVMTQTPLTLSVTIGQPASISCKSSQSLLDSDGKTYLNWLLQRPGQSPKRLIYLVSK | 235 | 746 |
| LDSGVPDRFTGSGSGTDFTLKISRVEAEDLGVYYCWQGTHFPFTFGSGTKLEIKR | | |
| DIVLTQSPASLAVSLGQRATISCKASQSVDYDGDSYMNWYQQKPGQPPKLLIYAAS | 236 | 747 |
| NLESGIPARFSGSGSGTDFTLNIHPVEEEDAATYYCQQSNEDPFTFGSGTKLEIKR | | |
| QLVLTQSSSASFSLGASAKLTCTLSSQHSTYTIEWYQQQPLKPPKYVMELKKDGSHS | 237 | 748 |
| TGDGIPDRFSGSSSGADRYLSISNIQPEDEAIYICGVGDTIKEQFVYVFGGGTKVTVLG | | |
| QIVLTQSPAIMSASPGEKVTMTCSASSSVSYMHWYQQKSGTSPKRWIYDTSKLASG | 238 | 749 |
| VPARFSGSGSGTSYSLTISSMEAEDAATYYCQQWSSNPLTFGAGTKLELKR | | |
| EIQMTQSPSSMSASLGDRITITCQATQDIVKNLNWYQQKPGKPPSFLIYYATELAEG | 239 | 750 |
| VPSRFSGSGSGSDYSLTISNLESEDFADYYCLQFYEFPLTFGAGTKLELKR | | |
| DIVLTQSPASLAVSLGQRATISCRASESVDNYGISFMNWFQQKPGQPPKLLIYAASN | 240 | 751 |
| QGSGVPARFSGSGSGTDFSLNIHPMEEDDTAMYFCQQSKEVPPTFGGGTKLEIKR | | |
| DIVMTQSPATLSVTPGDRVSLSCRASQSISDYLHWYQQKSHESPRLLIKYASQSISGIP | 241 | 752 |
| SRFSGSGSGSDFTLSINSVEPEDVGVYYCQNGHSFPLTFGAGTKLELKR | | |
| DVLMTQTPLSLPVSLGDQASISCRSSQSIVHSNGDTYLEWYLQKPGQSPKLLIYKVSN | 242 | 753 |
| RFSGVPDRFSGSGSGTDFTLKISRVEAEDLGVYYCFQGSHVPLTFGAGTKLELKR | | |
| QIVLTQSPAIMSASPGEKVTMTCSASSSVSYMHWYQQKSGTSPKRWIYDTSKLASG | 243 | 754 |
| VPARFSGSGSGTSYSLTISSMEAEDAATYYCQQWSSNPLTFGAGTKLELKR | | |
| DIVMTQSPTFLAVTASKKVTISCTASESLYSSKHKVHYLAWYQKKPEQSPKLLIYGAS | 244 | 755 |
| NRYIGVPDRFTGSGSGTDFTLTISSVQVEDLTHYYCAQFYSYPYTFGGGTKLEIKR | | |
| QLVLTQSSSASFSLGASAKLTCTLSSQHSTYTIEWYQQQPLKPPKYVMELKKDGSHS | 245 | 756 |
| TGDGIPDRFSGSSSGADRYLSISNIQPEDEAIYICGVGDTIKEQFVYVFGGGTKVTVLG | | |
| DIVLTQSPASLAVSLGQRATISCRASQSVSTSSYSYMHWYQQKPGQPPKLLIKYASN | 246 | 757 |
| LESGVPARFSGSGSGTDFTLNIHPVEEEDTATYYCQHSWEIPLTFGAGTKLELKR | | |
| QIVLTQSPAIMSASPGEKVTMTCSASSSVSYMHWYQQKSGTSPKRWIYDTSKLASG | 247 | 758 |
| VPARFSGSGSGTSYSLTISSMEAEDAATYYCQQWSSNPLTFGAGTKLELKR | | |
| DIQMTQSSSYLSVSLGGRVTITCKASDHINNWLAWYQQKPGNAPRLLISGATSLET | 248 | 759 |
| GVPSRFSGSGSGKDYTLSITSLQTEDVATYYCQQYWSTPLTFGAGTKLELKR | | |
| DIQMTQSPASLSASVGETVTITCRASENIYSYLAWYQQKQGKSPQLLVYNAKTLAEG | 249 | 760 |
| VPSRFSGSGSGTQFSLKINSLQPEDFGSYYCQHHYGTPYTFGGGTKLEIKR | | |
| DIQMTQSPASLSASVGETVTITCRASENIYSYLAWYQQKQGKSPQLLVYNAKTLAEG | 250 | 761 |
| VPSRFSGSGSGTQFSLKINSLQPEDFGSYYCQHHYGTPPTFGGGTKLEIKR | | |
| QIVLTQSPAIMSASPGEKVTMTCSASSSVSYMHWYQQKSGTSPKRWIYDTSKLASG | 251 | 762 |
| VPARFSGSGSGTSYSLTISSMEAEDAATYYCQQWSSNPPTFGAGTKLELKR | | |
| DIVLTQSPASLAVSLGQRATISCRASESVDNYGISFMNWFQQKPGQPPKLLIYAASN | 252 | 763 |
| QGSGVPARFSGSGSGTDFSLNIHPMEEDDTAMYFCQQSKEVPPTFGGGTKLEIKR | | |
| DIVMTQSPTFLAVTASKKVTISCTASESLYSSKHKVHYLAWYQKKPEQSPKLLIYGAS | 253 | 764 |
| NRYIGVPDRFTGSGSGTDFTLTISSVQVEDLTHYYCAQFYSYPYTFGGGTKLEIKR | | |
| QAVVTQESALTTSPGGTVILTCRSSTGAVTTSNYANWVQEKPDHLFTGLIGGTSNR | 254 | 765 |
| APGVPVRFSGSLIGDKAALTITGAQTEDDAMYFCALWYSTHYVFGGGTKVTVLG | | |
| QIVLTQSPAIMSASPGEKVTMTCSASSSISYMHWYQQKPGTSPKRWIYDTSKLASG | 255 | 766 |
| VPARFSGSGSGTSYSLTISSMEAEDAATYYCHQRSSYPTFGAGTKLELKR | | |
| DIVMTQSPDSLAVSLGERATINCKSSQSVLSSSYNKNYLAWYQQKPGQPPKLLIYWA | 257 | 9577 |
| STRESGVPDRFSGSGSGTDFTLTISSLQAEDVAVYYCQQYYSTPWTFGCGTKVEIKR | | |
| DIQMTQSPSSLSASVGDRVTITCRASQDIGDYLAWYQQKPGKAPKLLIYDASSLQSG | 258 | 9578 |
| VPSRFSGSGSGTDFTLTISSLQPEDFATYYCQQANSFPLTFGCGTKVEIKR | | |
| DIQMTQSPSSLSASVGDRVTITCRASQGISNYLAWYQQKPGKAPKLLIYSASNLQSG | 259 | 9579 |
| VPSRFSGSGSGTDFTLTISSLQPEDFATYYCQQSYSTPLTFGCGTKVEIKR | | |
| DIQMTQSPSSLSASVGDRVTITCRASQGIASYLAWYQQKPGKAPKLLIYAASTLQPG | 260 | 9580 |
| VPSRFSGSGSGTDFTLTISSLQPEDFATYYCQQFDSYPITFGQGTKVEIKR | | |
| DIQMTQSPSSLSASVGDRVTITCRASQSISSWLAWYQQKPGKAPKLLIYAASTLQSG | 261 | 9581 |
| VPSRFSGSGSGTDFTLTISSLQPEDFATYYCQQGYSTPYIFGQGTKVEIKR | | |
| DIQMTQSPSSLSASVGDRVTITCRASQGISNYLAWYQQKPGKAPKLLIYKASSLESGV | 262 | 9582 |
| PSRFSGSGSGTDFTLTISSLQPEDFATYYCQQSYNTPFTFGQGTRLEIKR | | |
| DIQMTQSPSSLSASVGDRVTITCRASQDISNYLNWYQQKPGKAPKLLIYDASNLETG | 263 | 9583 |
| VPSRFSGSGSGTDFTLTISSLQPEDFATYYCQQSYSTPLTFGQGTKVEIKR | | |
| DIVMTQSPDSLAVSLGERATINCKSSQSVLSSSYNKNYLAWYQQKPGQPPKLLIYWA | 26 | 9584 |
| STRESGVPDRFSGSGSGTDFTLTISSLQAEDVAVYYCQQYYSTPWTFGQGTKVEIKR | | |
| DIQMTQSPSSLSASVGDRVTITCRASQDISNYLNWYQQKPGKAPKLLIYDASNLETG | 265 | 9585 |
| VPSRFSGSGSGTDFTLTISSLQPEDFATYYCQQSYSTPLTFGQGTKVEIK | | |
| DIQMTQSPSSLSASVGDRVTITCRASQSISSYLNWYQQKPGKAPKLLIYAASSLQSGV | 266 | 9586 |
| PSRFSGSGSGTDFTLTISSLQPEDFATYYCQQSYSTPLTFGGGTKVEIK | | |
| DIQMTQSPSSLSASVGDRVTITCQASQDISNYLNWYQQKPGKAPKLLIYKASSLETG | 267 | 9587 |
| VPSRFSGSGSGTDFTLTISSLQPEDFATYYCQQSFSSPLTFGQGTKVEIK | | |
| DIQMTQSPSSLSASVGDRVTITCRASQNVNTWLAWYQQKPGKAPKLLIYEASSLQS | 268 | 9588 |
| GVPSRFSGSGSGTDFTLTISSLQPEDFATYYCQQANSFPFTFGQGTKLEIK | | |
| DIQMTQSPSSLSASVGDRVTITCRASQSISDWLAWYQQKPGKAPKLLIYAASSLQSG | 269 | 9589 |
| VPSRFSGSGSGTDFTLTISSLQPEDFATYYCAQHNHYPYTFGQGTRLEIK | | |
| DIVMTQSPDSLAVSLGERATINCKSSQSVLSSSYNKNYLAWYQQKPGQPPKLLIYWA | 270 | 9590 |
| STRESGVPDRFSGSGSGTDFTLTISSLQAEDVAVYYCQQYYTTPFTFGQGTKVEIK | | |
| DIVMTQSPDSLAVSLGERATINCKSSQSVLSSSYNKNYLAWYQQKPGQPPKLLIYWA | 271 | 9591 |
| STRASGVPDRFSGSGSGTDFTLTISSLQAEDVAVYYCQQYYSTPFTFGQGTKLEIK | | |
| DIQMTQSPSSLSASVGDRVTITCRASQAIRDDLGWYQQKPGKAPKLLIYDASHLEAG | 272 | 9592 |
| VPSRFSGSGSGTDFTLTISSLQPEDFATYYCQQANSFPITFGQGTRLEIK | | |
| DIQMTQSPSSLSASVGDRVTITCRASQGVGNDLAWYQQKPGKAPKLLIYAASTLQT | 273 | 9593 |
| GVPSRFSGSGSGTDFTLTISSLQPEDFATYYCQQASSFPLTFGPGTKVDIK | | |
| DIQMTQSPSSLSASVGDRVTITCRASQIIGTNLAWYQQKPGKAPKLLIYAASSLQSG | 274 | 9594 |
| VPSRFSGSGSGTDFTLTISSLQPEDFATYYCQQSYTFPVTFGQGTKLEIK | | |
| DIQMTQSPSSLSASVGDRVTITCRASQSISTWLAWYQQKPGKAPKLLIYDASSLESG | 275 | 9595 |
| VPSRFSGSGSGTDFTLTISSLQPEDFATYYCQQSYSTPFTFGPGTKVDIK | | |
| DIVMTQSPDSLAVSLGERATINCKSSQSVLSSSNNKNYLAWYQQKPGQPPKLLIYW | 276 | 9596 |
| ASTRESGVPDRFSGSGSGTDFTLTISSLQAEDVAVYYCQQYYGSPLTFGPGTKVDIK | | |
| DIVMTQSPDSLAVSLGERATINCKSSQSVLSSSYNKNYLAWYQQKPGQPPKLLIYWA | 277 | 9597 |
| STRESGVPDRFSGSGSGTDFTLTISSLQAEDVAVYYCQQYYSSPPTFGQGTRLEIK | | |
| DIVMTQSPDSLAVSLGERATINCKSSQSVLSSSYNKNYLAWYQQKPGQPPKLLIYWA | 278 | 9598 |
| STRESGVPDRFSGSGSGTDFTLTISSLQAEDVAVYYCQQYYSSPPTFGGGTKVEIK | | |
| DIVMTQSPDSLAVSLGERATINCKSSQSVLSSSYNKNYLAWYQQKPGQPPKLLIYWA | 279 | 9599 |
| STRESGVPDRFSGSGSGTDFTLTISSLQAEDVAVYYCQQYYSTPWTFGQGTKVEIK | | |
| DIVMTQSPDSLAVSLGERATINCKSSQSVLSSSYNKNYLAWYQQKPGQPPKLLIYWA | 280 | 9600 |
| STRASGVPDRFSGSGSGTDFTLTISSLQAEDVAVYYCQQYYGSPPTFGQGTRLEIK | | |
| DIQMTQSPSSLSASVGDRVTITCQASQDIRNYLNWYQQKPGKAPKLLIYDASTLQSG | 281 | 9601 |
| VPSRFSGSGSGTDFTLTISSLQPEDFATYYCQQAYSFPWTFGQGTKLEIK | | |
| DIQMTQSPSSLSASVGDRVTITCQASQDISNYLNWYQQKPGKAPKLLIYNASNLETG | 282 | 9602 |
| VPSRFSGSGSGTDFTLTISSLQPEDFATYYCQQLNSYPFTFGGGTKVEIK | | |
| DIQMTQSPSSLSASVGDRVTITCQASQSISTWLAWYQQKPGKAPKLLIYAASTLRSG | 283 | 9603 |
| VPSRFSGSGSGTDFTLTISSLQPEDFATYYCLQHYTYPLTFGQGTRLEIK | | |
| DIQMTQSPSSLSASVGDRVTITCRASEDISTYLAWYQQKPGKAPKLLIYAASTLQSGV | 284 | 9604 |
| PSRFSGSGSGTDFTLTISSLQPEDFATYYCQQSHTIPWTFGQGTRLEIK | | |
| DIQMTQSPSSLSASVGDRVTITCRASHHISDFLNWYQQKPGKAPKLLIYAASTLQSG | 285 | 9605 |
| VPSRFSGSGSGTDFTLTISSLQPEDFATYYCQQSYSSPYTFGQGTKLEIK | | |
| DIQMTQSPSSLSASVGDRVTITCRASQDIGDYLAWYQQKPGKAPKLLIYDASSLQSG | 286 | 9606 |
| VPSRFSGSGSGTDFTLTISSLQPEDFATYYCQQANSFPLTFGGGTKVEIK | | |
| DIQMTQSPSSLSASVGDRVTITCRASQDIRSYLAWYQQKPGKAPKLLIYAASSLQSG | 287 | 9607 |
| VPSRFSGSGSGTDFTLTISSLQPEDFATYYCQQSYTAPPTFGQGTRLEIK | | |
| DIQMTQSPSSLSASVGDRVTITCRASQDISNNLNWYQQKPGKAPKLLIYAASTLQSG | 288 | 9608 |
| VPSRFSGSGSGTDFTLTISSLQPEDFATYYCLQHNTYPLTFGQGTKLEIK | | |
| DIQMTQSPSSLSASVGDRVTITCRASQDISNWLAWYQQKPGKAPKLLIYDASSLQS | 289 | 9609 |
| GVPSRFSGSGSGTDFTLTISSLQPEDFATYYCQQAISFPLTFGGGTKVEIK | | |
| DIQMTQSPSSLSASVGDRVTITCRASQGIANYLAWYQQKPGKAPKLLIYAASSLQSG | 290 | 9610 |
| VPSRFSGSGSGTDFTLTISSLQPEDFATYYCQQADSFPLTFGQGTKVEIK | | |
| DIQMTQSPSSLSASVGDRVTITCRASQGIASYLAWYQQKPGKAPKLLIYAASTLQPG | 291 | 9611 |
| VPSRFSGSGSGTDFTLTISSLQPEDFATYYCQQFDSYPITFGQGTKVEIK | | |
| DIQMTQSPSSLSASVGDRVTITCRASQGISNYLAWYQQKPGKAPKLLIYAASRLQSG | 292 | 9612 |
| VPSRFSGSGSGTDFTLTISSLQPEDFATYYCQQSSIIPFTFGQGTKLEIK | | |
| DIQMTQSPSSLSASVGDRVTITCRASQGISNYLAWYQQKPGKAPKLLIYAASTLQSG | 293 | 9613 |
| VPSRFSGSGSGTDFTLTISSLQPEDFATYYCQQAYSFPYTFGQGTKLEIK | | |
| DIQMTQSPSSLSASVGDRVTITCRASQSIGRWLAWYQQKPGKAPKLLIYDASNLET | 294 | 9614 |
| GVPSRFSGSGSGTDFTLTISSLQPEDFATYYCQQSYSTPRTFGQGTKVEIK | | |
| DIQMTQSPSSLSASVGDRVTITCRASQSINSWLAWYQQKPGKAPKLLIYDTSSLQSG | 295 | 9615 |
| VPSRFSGSGSGTDFTLTISSLQPEDFATYYCQQTYSTPYTFGQGTKLEIK | | |
| DIQMTQSPSSLSASVGDRVTITCRASQSISSWLAWYQQKPGKAPKLLIYAASTLQSG | 296 | 9616 |
| VPSRFSGSGSGTDFTLTISSLQPEDFATYYCQQGYSTPYIFGQGTKVEIK | | |
| DIQMTQSPSSLSASVGDRVTITCRASQSISSYLNWYQQKPGKAPKLLIYAASSLQSGV | 297 | 9617 |
| PSRFSGSGSGTDFTLTISSLQPEDFATYYCQQTDSIPITFGQGTRLEIK | | |
| DIQMTQSPSSLSASVGDRVTITCRASQSISSYLNWYQQKPGKAPKLLIYAASTLQSGV | 29 | 9618 |
| PSRFSGSGSGTDFTLTISSLQPEDFATYYCQQSYSIPYTFGQGTKVEIK | | |
| DIQMTQSPSSLSASVGDRVTITCRASQTIRSYLNWYQQKPGKAPKLLIYKASSLESGV | 299 | 9619 |
| PSRFSGSGSGTDFTLTISSLQPEDFATYYCQQTYTIPITFGPGTKVDIK | | |
| DIQMTQSPSSLSASVGDRVTITCRASQTISNWLAWYQQKPGKAPKLLIYAASTLQSG | 300 | 9620 |
| VPSRFSGSGSGTDFTLTISSLQPEDFATYYCQQANSFPPTFGQGTKVEIK | | |
| DIQMTQSPSSLSASVGDRVTITCRASQYIGSYLNWYQQKPGKAPKLLIYDASNLETG | 301 | 9621 |
| VPSRFSGSGSGTDFTLTISSLQPEDFATYYCQQVDSYPLTFGGGTKVEIK | | |
| DIVMTQSPLSLPVTPGEPASISCRSSQSLLHSNGYNYLDWYLQKPGQSPQLLIYLGSN | 302 | 9622 |
| RASGVPDRFSGSGSGTDFTLKISRVEAEDVGVYYCMQGTHWPPTFGQGTKLEIK | | |
| DIVMTQSPLSLPVTPGEPASISCRSSQSLLHSNGYNYLDWYLQKPGQSPQLLIYFGSN | 303 | 9623 |
| RASGVPDRFSGSGSGTDFTLKISRVEAEDVGVYYCMQALQAPVSFGQGTRLEIK | | |
| DIVMTQSPDSLAVSLGERATINCKSSQSVLSSSYNKNYLAWYQQKPGQPPKLLIYWA | 304 | 9624 |
| SSRQSGVPDRFSGSGSGTDFTLTISSLQAEDVAVYYCQQYYSTPLTFGQGTKVEIK | | |
| DIVMTQSPDSLAVSLGERATINCKSSQSVSSSSYNKNYLAWYQQKPGQPPKLLIYW | 30 | 9625 |
| ASVRESGVPDRFSGSGSGTDFTLTISSLQAEDVAVYYCQQYYSTPITFGQGTRLEIK | | |
| DIVMTQSPDSLAVSLGERATINCKSTQNVLSSSNNNSYLAWYQQKPGQPPKLLIYW | 306 | 9626 |
| ASTRESGVPDRFSGSGSGTDFTLTISSLQAEDVAVYYCQQYYSTPFTFGQGTRLEIK | | |
| DIQMTQSPSSLSASVGDRVTITCQASQDIGNYLNWYQQKPGKAPKLLIYAASSLQS | 607 | 9627 |
| GVPSRFSGSGSGTDFTLTISSLQPEDFATYYCQQTYNTPLTFGGGTKLEIK | | |
| DIQMTQSPSSLSASVGDRVTITCQASQDISNYLNWYQQKPGKAPKLLIYEASTLQSG | 608 | 9628 |
| VPSRFSGSGSGTDFTLTISSLQPEDFATYYCQQSYSTPFTFGPGTKVDIK | | |
| DIQMTQSPSSLSASVGDRVTITCQASQDISTWLAWYQQKPGKAPKLLIYRASTLESG | 609 | 9629 |
| VPSRFSGSGSGTDFTLTISSLQPEDFATYYCQQSYSIPLTFGGGTKVEIK | | |
| DIQMTQSPSSLSASVGDRVTITCRASQNINNYLNWYQQKPGKAPKLLIYAASRLQSG | 310 | 9630 |
| VPSRFSGSGSGTDFTLTISSLQPEDFATYYCQQSYSAPVTFGQGTKLEIK | | |
| DIQMTQSPSSLSASVGDRVTITCRASQNINTWLAWYQQKPGKAPKLLIYAASSLQS | 311 | 9631 |
| GVPSRFSGSGSGTDFTLTISSLQPEDFATYYCQQAYSFPFTFGPGTKVDIK | | |
| DIQMTQSPSSLSASVGDRVTITCRASQRIGNYLNWYQQKPGKAPKLLIYAASSLQSG | 312 | 9632 |
| VPSRFSGSGSGTDFTLTISSLQPEDFATYYCQQSYSTPLTFGGGTKVEIK | | |
| DIQMTQSPSSLSASVGDRVTITCRASQSISTYLNWYQQKPGKAPKLLIYAASTLQSGV | 313 | 9633 |
| PSRFSGSGSGTDFTLTISSLQPEDFATYYCQQSYRTVTFGQGTRLEIK | | |
| EIVMTQSPATLSVSPGERATLSCRASQSVGSYLAWYQQKPGQAPRLLIYGASTRATG | 314 | 9634 |
| IPARFSGSGSGTEFTLTISSLQSEDFAVYYCQQYDSSSQTFGQGTKVEIK | | |
| EIVMTQSPATLSVSPGERATLSCRASRSVSTYLAWYQQKPGQAPRLLIYGASTRATGI | 315 | 9635 |
| PARFSGSGSGTEFTLTISSLQSEDFAVYYCQQYDGSPYTFGQGTKLEIK | | |
| DIVMTQSPLSLPVTPGEPASISCRSSQSLLHSNGYNYLDWYLQKPGQSPQLLIYDAS | 316 | 9636 |
| NLETGVPDRFSGSGSGTDFTLKISRVEAEDVGVYYCMQALQTPPAFGPGTKVDIK | | |
| DIVMTQSPDSLAVSLGERATINCKSSQSVLSSSYNKNFLAWYQQKPGQPPKLLIYWA | 317 | 9637 |
| STRESGVPDRFSGSGSGTDFTLTISSLQAEDVAVYYCQQYYSAPPTFGQGTKVEIK | | |
| DIVMTQSPDSLAVSLGERATINCKSSQSVLSSSYNKNFLAWYQQKPGQPPKLLIYWA | 318 | 9638 |
| STRESGVPDRFSGSGSGTDFTLTISSLQAEDVAVYYCQQYYSDPITFGQGTKLEIK | | |
| DIVMTQSPDSLAVSLGERATINCKSSQSVLSSSYNKNYLAWYQQKPGQPPKLLIYWA | 319 | 9639 |
| SARESGVPDRFSGSGSGTDFTLTISSLQAEDVAVYYCQQYYSIPIAFGQGTRLEIK | | |
| DIVMTQSPDSLAVSLGERATINCKSSQSVLSSSYNKNYLAWYQQKPGQPPKLLIYWA | 320 | 9640 |
| STRDSGVPDRFSGSGSGTDFTLTISSLQAEDVAVYYCQQYYSIPYTFGQGTKLEIK | | |
| DIVMTQSPDSLAVSLGERATINCKSSQSVLSTSYNKNYLAWYQQKPGQPPKLLIYW | 321 | 9641 |
| ASTRASGVPDRFSGSGSGTDFTLTISSLQAEDVAVYYCQQYYTTPPTFGQGTKVEIK | | |
| DIVMTQSPDSLAVSLGERATINCKSSQSVLSTSYNRNFLAWYQQKPGQPPKLLIYW | 322 | 9642 |
| ASTRQSGVPDRFSGSGSGTDFTLTISSLQAEDVAVYYCQQYYSTPYTFGQGTKLEIK | | |
| DIVMTQSPDSLAVSLGERATINCKSSQSVLYSSNNKNYLAWYQQKPGQPPKLLIYW | 323 | 9643 |
| ASTRESGVPDRFSGSGSGTDFTLTISSLQAEDVAVYYCQQYYSTPLTFGGGTKVEIK | | |
| DIQMTQSPSSLSASVGDRVTITCQASQDISNYLNWYQQKPGKAPKLLIYAASSLQSG | 324 | 9644 |
| VPSRFSGSGSGTDFTLTISSLQPEDFATYYCQQSYSTPTFGQGTKVEIK | | |
| DIQMTQSPSSLSASVGDRVTITCQASQDISNYLNWYQQKPGKAPKLLIYGASTLQSG | 325 | 9645 |
| VPSRFSGSGSGTDFTLTISSLQPEDFATYYCQEADSFPLTFGGGTKVEIK | | |
| DIQMTQSPSSLSASVGDRVTITCRASQGIRNDLGWYQQKPGKAPKLLIYDASSLHSG | 326 | 9646 |
| VPSRFSGSGSGTDFTLTISSLQPEDFATYYCQQAYSFPWTFGQGTKLEIK | | |
| DIQMTQSPSSLSASVGDRVTITCRASQGISNYLAWYQQKPGKAPKLLIYKASSLESGV | 327 | 9647 |
| PSRFSGSGSGTDFTLTISSLQPEDFATYYCQQSYNTPFTFGQGTRLEIK | | |
| DIQMTQSPSSLSASVGDRVTITCRASQSINRWLAWYQQKPGKAPKLLIYSASNLQS | 328 | 9648 |
| GVPSRFSGSGSGTDFTLTISSLQPEDFATYYCQQSYNTPLTFGGGTKVEIK | | |
| DIQMTQSPSSLSASVGDRVTITCRASQSINTWLAWYQQKPGKAPKLLIYAASSLQSG | 329 | 9649 |
| VPSRFSGSGSGTDFTLTISSLQPEDFATYYCQQANSFPFTFGPGTKVDIK | | |
| DIQMTQSPSSLSASVGDRVTITCRASQSIRTWLAWYQQKPGKAPKLLIYDASSLETG | 330 | 9650 |
| VPSRFSGSGSGTDFTLTISSLQPEDFATYYCQQLNSYPLTFGGGTKVEIK | | |
| DIQMTQSPSSLSASVGDRVTITCRASQSIRTYLNWYQQKPGKAPKLLIYAASTLQSG | 331 | 9651 |
| VPSRFSGSGSGTDFTLTISSLQPEDFATYYCQQSYSAPLTFGGGTKLEIK | | |
| DIQMTQSPSSLSASVGDRVTITCRASQSISTYLNWYQQKPGKAPKLLIYAASSLHSGV | 332 | 9652 |
| PSRFSGSGSGTDFTLTISSLQPEDFATYYCQQSYSTPLTFGGGTKVEIK | | |
| DIQMTQSPSSLSASVGDRVTITCRASQSITTYLNWYQQKPGKAPKLLIYAASTLQSG | 333 | 9653 |
| VPSRFSGSGSGTDFTLTISSLQPEDFATYYCQQSYSTPLTFGGGTKVEIK | | |
| DIVMTQSPLSLPVTPGEPASISCRSSQSLLHSNGYNYLDWYLQKPGQSPQLLIYAASS | 334 | 9654 |
| LQSGVPDRFSGSGSGTDFTLKISRVEAEDVGVYYCMQARQTPLTFGQGTRLEIK | | |
| DIVMTQSPLSLPVTPGEPASISCRSSQSLLHSNGYNYLDWYLQKPGQSPQLLIYGASS | 335 | 9655 |
| LQSGVPDRFSGSGSGTDFTLKISRVEAEDVGVYYCMQTLQTPFTFGPGTKVDIK | | |
| DIVMTQSPLSLPVTPGEPASISCRSSQSLLHSNGYNYLDWYLQKPGQSPQLLIYLGSD | 336 | 9656 |
| RASGVPDRFSGSGSGTDFTLKISRVEAEDVGVYYCMQALQTPLTFGPGTKVDIK | | |
| DIVMTQSPDSLAVSLGERATINCKSSQTVFSTSYNKNYLAWYQQKPGQPPKLLIYW | 337 | 9657 |
| ASTRESGVPDRFSGSGSGTDFTLTISSLQAEDVAVYYCQQYYSTPLTFGGGTKVEIK | | |
| DIVMTQSPDSLAVSLGERATINCKTSQSVFSTSYNRDYLAWYQQKPGQPPKLLIYW | 338 | 9658 |
| ASTRESGVPDRFSGSGSGTDFTLTISSLQAEDVAVYYCQQYYSSPPTFGQGTKVEIK | | |
| DIQMTQSPSSLSASVGDRVTITCRASQSISSWLAWYQQKPGKAPKLLIYDASTLQSG | 339 | 9659 |
| VPSRFSGSGSGTDFTLTISSLQPEDFATYYCQQSYSTPFTFGPGTKVDIK | | |
| DIQMTQSPSSLSASVGDRVTITCRASQSISSYLNWYQQKPGKAPKLLIYDASNLKTG | 340 | 9660 |
| VPSRFSGSGSGTDFTLTISSLQPEDFATYYCQQSYSFPTFGGGTKVEIK | | |
| EIVMTQSPATLSVSPGERATLSCRASQSVSSYLAWYQQKPGQAPRLLIYDTSSRATGI | 341 | 9661 |
| PARFSGSGSGTEFTLTISSLQSEDFAVYYCQQYYDTPYTFGQGTKLEIKR* | | |
| DIVMTQSPDSLAVSLGERATINCKSSQSVLYSSNNKNYLAWYQQKPGQPPKLLIYLA | 342 | 9662 |
| STREPGVPDRFSGSGSGTDFTLTISSLQAEDVAVYYCQQYYSTPPTFGGGTKLEIKR* | | |
| DIVMTQSPDSLAVSLGERATINCKSSQSVLSSSYNKNYVAWYQQKPGQPPKLLIYWA | 343 | 9663 |
| STRESGVPDRFSGSGSGTDFTLTISSLQAEDVAVYYCQQYYSTPLTFGGGTKVEIKR* | | |
| DIQMTQSPSSLSASVGDRVTITCQASQDISNYLNWYQQKPGKAPKLLIYAAASLQSG | 344 | 9664 |
| VPSRFSGSGSGTDFTLTISSLQPEDFATYYCQQTYSTPWTFGQGTRLEIKR* | | |
| DIQMTQSPSSLSASVGDRVTITCRASQDINTYLAWYQQKPGKAPKLLIYAASSLQSG | 345 | 9665 |
| VPSRFSGSGSGTDFTLTISSLQPEDFATYYCQQSSSFPLTFGQGTKVEIKR* | | |
| DIQMTQSPSSLSASVGDRVTITCQASQDISNYLNWYQQKPGKAPKLLIYAASSLQSG | 346 | 9666 |
| VPSRFSGSGSGTDFTLTISSLQPEDFATYYCQQLYNFPYTFGGGTKVEIKR* | | |
| DIQMTQSPSSLSASVGDRVTITCRASQSISRYLAWYQQKPGKAPKLLIYGASTRESGV | 347 | 9667 |
| PSRFSGSGSGTDFTLTISSLQPEDFATYYCQQSYNTPLTFGQGTKLEIKR | | |
| DIQMTQSPSSLSASVGDRVTITCRASQTLSGWLAWYQQKPGKAPKLLIYGASTLQG | 348 | 9668 |
| GVPSRFSGSGSGTDFTLTISSLQPEDFATYYCQQYYSYPPTFGQGTKVEIKR* | | |
| DIQMTQSPSSLSASVGDRVTITCFASQDIINYLNWYQQKPGKAPKLLIYEASNLETGV | 349 | 9669 |
| PSRFSGSGSGTDFTLTISSLQPEDFATYYCQQSYSTPLTFGQGTKVEIKR | | |
| DIQMTQSPSSLSASVGDRVTITCRASQSISSYLNWYQQKPGKAPKLLIYDVFNLGTG | 350 | 9670 |
| VPSRFSGSGSGTDFTLTISSLQPEDFATYYCQQSYSSPFTFGQGTRLEIKR* | | |
| DIQMTQSPSSLSASVGDRVTITCQASQDISNYLNWYQQKPGKAPKLLIYMASNLES | 351 | 9671 |
| GVPSRFSGSGSGTDFTLTISSLQPEDFATYYCQQTNSFPLTFGQGTKLEIKR* | | |
| DIQMTQSPSSLSASVGDRVTITCRASQSISSYLNWYQQKPGKAPKLLIYDASNLETGV | 352 | 9672 |
| PSRFSGSGSGTDFTLTISSLQPEDFATYYCQQSYSTPLTFGGGTKVEIKR* | | |
| DIVMTQSPLSLPVTPGEPASISCRSSQSLLHSNGYNYLDWYLQKPGQSPQLLIYLGSN | 353 | 9673 |
| RASGVPDRFSGSGSGTDFTLKISRVEAEDVGVYYCMQALQSPWTFGQGTKLEIKR* | | |
| DIVMTQSPDSLAVSLGERATINCKSSQSVLYSSNNKNYLAWYQQKPGQPPKLLIYW | 354 | 9674 |
| ASTRESGVPDRFSGSGSGTDFTLTISSLQAEDVAVYYCQQYYSSPLTFGGGTKVEIKR | | |
| * | | |
| DIVMTQSPLSLPVTPGEPASISCRSSQSLLHSNGYNYLDWYLQKPGQSPQLLIYLGSN | 355 | 9675 |
| RASGVPDRFSGSGSGTDFTLKISRVEAEDVGVYYCMQALQTPPSFGQGTKVEIKR* | | |
| DIQMTQSPSSLSASVGDRVTITCRASESVSTWLAWYQQKPGKAPKLLIYKASRLESG | 356 | 9676 |
| VPSRFSGSGSGTDFTLTISSLQPEDFATYYCQQSYKTPYTFGQGTKLEIKR* | | |
| DIVMTQSPDSLAVSLGERATINCKSSQSVLYSSNNKNYLAWYQQKPGQPPKLLIYW | 357 | 9677 |
| ASTRESGVPDRFSGSGSGTDFTLTISSLQAEDVAVYYCQQYFTTPLTFGQGTKLEIKR | | |
| * | | |
| DIQMTQSPSSLSASVGDRVTITCRASQSISSYLNWYQQKPGKAPKLLIYAASSLQSGV | 358 | 9678 |
| PSRFSGSGSGTDFTLTISSLQPEDFATYYCQQSYSTPYTFGQGTKVEIKR* | | |
| DIVMTQSPDSLAVSLGERATINCKSSQSVLSSSYNKNYLAWYQQKPGQPPKLLIYWA | 359 | 9679 |
| STRASGVPDRFSGSGSGTDFTLTISSLQAEDVAVYYCQQYYDTPLTFGQGTKVEIKR* | | |
| DIQMTQSPSSLSASVGDRVTITCRASQSISSYLNWYQQKPGKAPKLLIYKASTLESGV | 360 | 9680 |
| PSRFSGSGSGTDFTLTISSLQPEDFATYYCQQNDSIPITFGQGTRLEIKR* | | |
| DIQMTQSPSSLSASVGDRVTITCRASQSISRWLAWYQQKPGKAPKLLIYDASNLETG | 361 | 9681 |
| VPSRFSGSGSGTDFTLTISSLQPEDFATYYCLQDYSYPLTFGQGTKVEIKR* | | |
| DIVMTQSPDSLAVSLGERATINCKTSQSVFSTSYNRDYLAWYQQKPGQPPKLLIYW | 362 | 9682 |
| ASTRAAGVPDRFSGSGSGTDFTLTISSLQAEDVAVYYCQQYYYTSTFGQGTKVEIKR* | | |
| DIQMTQSPSSLSASVGDRVTITCRASQSINRYLNWYQQKPGKAPKLLIYAASSLQSG | 363 | 9683 |
| VPSRFSGSGSGTDFTLTISSLQPEDFATYYCQQANSFPPTFGGGTKVEIKR* | | |
| DIQMTQSPSSLSASVGDRVTITCRASQGISNYLAWYQQKPGKAPKLLIYSASNLQSG | 364 | 9684 |
| VPSRFSGSGSGTDFTLTISSLQPEDFATYYCQQSYSTPLTFGGGTKVEIKR* | | |
| DIQMTQSPSSLSASVGDRVTITCRASQSIDSYLNWYQQKPGKAPKLLIYKASTLESGV | 365 | 9685 |
| PSRFSGSGSGTDFTLTISSLQPEDFATYYCQQSYSAPLTFGGGTKVEIKR* | | |
| DIQMTQSPSSLSASVGDRVTITCRASQDISTWLAWYQQKPGKAPKLLIYDASNLETG | 366 | 9686 |
| VPSRFSGSGSGTDFTLTISSLQPEDFATYYCQQVNSDPYTFGQGTRLEIKR* | | |
| DIQMTQSPSSLSASVGDRVTITCQASQDISNYLNWYQQKPGKAPKLLIYAASTLESG | 367 | 9687 |
| VPSRFSGSGSGTDFTLTISSLQPEDFATYYCQQGDSLPLTFGGGTKVEIKR* | | |
| DIQMTQSPSSLSASVGDRVTITCRASQGISNYLAWYQQKPGKAPKLLIYAASSLQSG | 368 | 9688 |
| VPSRFSGSGSGTDFTLTISSLQPEDFATYYCQQSDSFPYTFGQGTKVEIKR* | | |
| EIVMTQSPATLSVSPGERATLSCRASQSVSTYLAWYQQKPGQAPRLLIYGASTRATG | 369 | 9689 |
| IPARFSGSGSGTEFTLTISSLQSEDFAVYYCQQHDSYPLTFGGGTKVEIKR* | | |
| DIQMTQSPSSLSASVGDRVTITCRASQGIRNDLGWYQQKPGKAPKLLIYAASSLQSG | 370 | 9690 |
| VPSRFSGSGSGTDFTLTISSLQPEDFATYYCQQANSFPPTFGQGTRLEIKR* | | |
| DIQMTQSPSSLSASVGDRVTITCRASESISTYLNWYQQKPGKAPKLLIYKASNLESGV | 371 | 9691 |
| PSRFSGSGSGTDFTLTISSLQPEDFATYYCQQTDSTFITFGQGTKVEIKR* | | |
| DIQMTQSPSSLSASVGDRVTITCRASRNIHDYLNWYQQKPGKAPKLLIYAASTLQTG | 372 | 9692 |
| VPSRFSGSGSGTDFTLTISSLQPEDFATYYCQQTYSTPPTFGPGTKVDIKR* | | |
| DIQMTQSPSSLSASVGDRVTITCRASQSNDSYLNWYQQKPGKAPKLLIYKASTLESG | 373 | 9693 |
| VPSRFSGSGSGTDFTLTISSLQPEDFATYYCQQSYSSPLTFGQGTKVEIKR | | |
| DIQMTQSPSSLSASVGDRVTITCRASQSISDFLNWYQQKPGKAPKLLIYAASTLQSG | 374 | 9694 |
| VPSRFSGSGSGTDFTLTISSLQPEDFATYYCQQSYSSPYTFGQGTKVEIKR* | | |
| DIQMTQSPSSLSASVGDRVTITCQASQDISNYLNWYQQKPGKAPKLLIYAASSLQSG | 375 | 9695 |
| VPSRFSGSGSGTDFTLTISSLQPEDFATYYCQQANRFPLTFGQGTKLEIKR* | | |
| DIQMTQSPSSLSASVGDRVTITCQASQDISNYLNWYQQKPGKAPKLLIYKASNLQSG | 376 | 9696 |
| VPSRFSGSGSGTDFTLTISSLQPEDFATYYCQQSYNFPATFGQGTRLEIKR* | | |
| DIVMTQSPLSLPVTPGEPASISCRSSQSLLHSNGYNYLDWYLQKPGQSPQLLIYLGSN | 377 | 9697 |
| RASGVPDRFSGSGSGTDFTLKISRVEAEDVGVYYCMQGTHWPETFGQGTKVEIKR* | | |
| DIQMTQSPSSLSASVGDRVTITCRASQSISSYLNWYQQKPGKAPKLLIYDASNLETGV | 378 | 9698 |
| PSRFSGSGSGTDFTLTISSLQPEDFATYYCQQSYSTPLTFGQGTKLEIKR* | | |
| DIQMTQSPSSLSASVGDRVTITCRASQGISDYLAWYQQKPGKAPKLLIYDASNLETG | 379 | 9699 |
| VPSRFSGSGSGTDFTLTISSLQPEDFATYYCQQSYILPLTFGGGTKVEIKR* | | |
| DIQMTQSPSSLSASVGDRVTITCRASQDINDFLAWYQQKPGKAPKLLIYAASSLQSG | 380 | 9700 |
| VPSRFSGSGSGTDFTLTISSLQPEDFATYYCQQSYSAPYTFGQGTKLEIKR* | | |
| DIQMTQSPSSLSASVGDRVTITCRASQSISNWLAWYQQKPGKAPKLLIYAASKLESG | 381 | 9701 |
| VPSRFSGSGSGTDFTLTISSLQPEDFATYYCQQSYSSPWTFGQGTRLEIKR* | | |
| DIQMTQSPSSLSASVGDRVTITCRASQGIDSWLAWYQQKPGKAPKLLIYAASTLESG | 382 | 9702 |
| VPSRFSGSGSGTDFTLTISSLQPEDFATYYCQQAYSFPLTFGGGTKVEIKR* | | |
| DIQMTQSPSSLSASVGDRVTITCRASQNIGTWLAWYQQKPGKAPKLLIYRASSLESG | 383 | 9703 |
| VPSRFSGSGSGTDFTLTISSLQPEDFATYYCQQAYSFPWTFGQGTKLEIKR* | | |
| DIQMTQSPSSLSASVGDRVTITCRASQNINNWLAWYQQKPGKAPKLLIYKASTLQS | 384 | 9704 |
| GVPSRFSGSGSGTDFTLTISSLQPEDFATYYCQQADSFPPTFGQGTKVEIKR* | | |
| DIQMTQSPSSLSASVGDRVTITCRASQDISSYLAWYQQKPGKAPKLLIYAASTLQSG | 385 | 9705 |
| VPSRFSGSGSGTDFTLTISSLQPEDFATYYCQQLNRYPITFGQGTKVEIKR* | | |
| DIQMTQSPSSLSASVGDRVTITCRASQDISNYLAWYQQKPGKAPKLLIYAASILHSGV | 386 | 9706 |
| PSRFSGSGSGTDFTLTISSLQPEDFATYYCQQYDSSFITFGQGTRLEIKR* | | |

TABLE 22
CDRs using the Kabat Numbering Scheme
Table 22-Kabat CDR Sequence

| | HCDR1 | | HCDR2 | | HCDR3 | |
|---|---|---|---|---|---|---|
| Binder | | SEQ ID | | SEQ ID | | SEQ ID |
| Name | Sequence | NO: | Sequence | NO: | Sequence | NO: |
| 109 | SYWIE | 1280 | EILPGSGSTNYNEKFKG | 1794 | RAYGYDGGFDY | 2308 |
| 110 | SYWIE | 1281 | EILPGSGSTNYIEKFKG | 1795 | RAYGYDEGFDY | 2309 |
| 111 | SYWIE | 1282 | EILPGSDSTSYNEKFKG | 1796 | RAYGYDEGFDY | 2310 |
| 112 | IYWIE | 1283 | EILPGSGSTNYNEKVKG | 1797 | RAYGYDGGFDY | 2311 |
| 1 | SYWIE | 1284 | EIFPGSGHTSFNEKFKG | 1798 | RGYGYDEGFDY | 2312 |
| 113 | SYWIE | 1285 | EILPGSGSTNYNEKFKG | 1799 | RGYGYDEGFDY | 2313 |
| 114 | SYWIE | 1286 | EILPGSGSTNYNEKFKG | 1800 | RGYGYDEGFDY | 2314 |
| 115 | NYWIE | 1287 | EILPGSGSTSYNEKFKG | 1801 | RGYGYDEGFDY | 2315 |
| 23 | SYWIE | 1288 | EILPGSGSTSYNEKFKG | 1802 | RGYGYDEGFDY | 2316 |
| 116 | SYWIE | 1289 | EILPGSGYTSYIEQFKG | 1803 | RGYGYDEGFDY | 2317 |
| 117 | SYWIE | 1290 | EILPGSGSTSYNEKFKD | 1804 | RAYGYDEGFDY | 2318 |
| 2 | SYWIE | 1291 | EILPGSGSTSYNEKFKG | 1805 | RGYGYDEGFDY | 2319 |
| 118 | SYWIE | 1292 | EVLPGSGSTSYNEKFKG | 1806 | RAYGYDEGFDY | 2320 |
| 119 | SYWIE | 1293 | EISPGSGSTNYNEKFKG | 1807 | RGYGYDEGFDY | 2321 |
| 120 | TYWIE | 1294 | EILPGSGTPNYNEKFKG | 1808 | RAYGYDAGFDY | 2322 |
| 121 | SYWIE | 1295 | EILPGSGSTSCNEKFKG | 1809 | RGYGYDEGFDY | 2323 |
| 122 | SYWIE | 1296 | EILPGSGRTSYIEKFKG | 1810 | RGYGYDEGFDY | 2324 |
| 123 | SYWIE | 1297 | EILPGSGRTSYIEKFKG | 1811 | RGYGYDEGFDY | 2325 |
| 38 | SYWIE | 1298 | EILPGSGSTSYNEKFKD | 1812 | RAYGYDEGFDY | 2326 |
| 39 | SYWIE | 1299 | EVLPGSGSTSYNEKFKG | 1813 | RAYGYDEGFDY | 2327 |
| 40 | SYWIE | 1300 | EILPGSGRTSYIEKFKG | 1814 | RGYGYDEGFDY | 2328 |
| 41 | SYWIE | 1301 | EVLPGSGSTSYNEKFKG | 1815 | RAYGYDEGFDY | 2329 |
| 42 | SYWIE | 1302 | EILPGSGRTSYIEKFKG | 1816 | RGYGYDEGFDY | 2330 |
| 43 | SYWIE | 1303 | EILPGSGSTNYNEKFKG | 1817 | RAYGYDGGFDY | 2331 |
| 44 | SYWIE | 1304 | EILPGSDSTSYNEKFKG | 1818 | RAYGYDEGFDY | 2332 |
| 45 | IYWIE | 1305 | EILPGSGSTNYNEKVKG | 1819 | RAYGYDGGFDY | 2333 |
| 46 | SYWIE | 1306 | EIFPGSGHTSFNEKFKG | 1820 | RGYGYDEGFDY | 2334 |
| 47 | NYWIE | 1307 | EILPGSGSTSYNEKFKG | 1821 | RGYGYDEGFDY | 2335 |
| 47 | NYWIE | 1307 | EILPGSGSTSYNEKFKG | 1821 | RGYGYDEGFDY | 2335 |
| 48 | SYWIE | 1308 | EILPGSGSTSYNEKFKG | 1822 | RGYGYDEGFDY | 2336 |
| 48 | SYWIE | 1308 | EILPGSGSTSYNEKFKG | 1822 | RGYGYDEGFDY | 2336 |
| 49 | SYWIE | 1309 | EILPGSGYTSYIEQFKG | 1823 | RGYGYDEGFDY | 2337 |
| 50 | SYWIE | 1310 | EILPGSGSTSYNEKFKG | 1824 | RGYGYDEGFDY | 2338 |
| 51 | SYWIE | 1311 | EISPGSGSTNYNEKFKG | 1825 | RGYGYDEGFDY | 2339 |
| 52 | TYWIE | 1312 | EILPGSGTPNYNEKFKG | 1826 | RAYGYDAGFDY | 2340 |
| 53 | SYWIE | 1313 | EILPGSGSTSCNEKFKG | 1827 | RGYGYDEGFDY | 2341 |
| 54 | SYWIE | 1314 | EILPGSGRTSYIEKFKG | 1828 | RGYGYDEGFDY | 2342 |
| 55 | NYWIE | 1315 | EILPGSGSTSYNEKFKG | 1829 | RGYGYDEGFDY | 2343 |
| 56 | SYWIE | 1316 | EILPGSGSTSYNEKFKG | 1830 | RGYGYDEGFDY | 2344 |
| 3 | GYYMH | 1317 | YISSYNGATSYNQKFKG | 1831 | GRYGEYFDY | 2345 |
| 4 | GYYMH | 1318 | YISSYNGVTGYNQKFKG | 1832 | GRYGDYFDY | 2346 |
| 5 | GYYMH | 1319 | YISSYNGVTSYNQKFKG | 1833 | GRYGDYFDY | 2347 |
| 6 | GYYMH | 1320 | YISSYNGVTGYNQKFKG | 1834 | GRYGDYFDY | 2348 |
| 7 | GYYMH | 1321 | YISSYNGANGYNQKFKG | 1835 | GRYGDYFDY | 2349 |
| 8 | GYYMH | 1322 | YISSYNGVTGYNQKFKG | 1836 | GRYGDYFDY | 2350 |
| 9 | GYYMH | 1323 | YISSYNGVTGYNQKFKG | 1837 | GRYGDYFDY | 2351 |
| 10 | GYYMH | 1324 | YISSYNGVTGYNQKFKG | 1838 | GRYGDYFDY | 2352 |
| 11 | GYYMH | 1325 | YISSYNGVTGYNQKFKG | 1839 | GRYGDYFDY | 2353 |
| 12 | GFYMH | 1326 | YISSYNGATGYNQKFKG | 1840 | GRYGDYFDY | 2354 |
| 13 | GYYMH | 1327 | YISSYNGATGYNQKFKG | 1841 | GRYGDYFDY | 2355 |
| 57 | GYYMH | 1328 | YISSYNGVTGYNQKFKG | 1842 | GRYGDYFDY | 2356 |
| 58 | GYYMH | 1329 | YISSYNGATSYNQKFKG | 1843 | GRYGEYFDY | 2357 |
| 124 | SYGVH | 1330 | VIWRGGSTDYNAAFMS | 1844 | NLYGHYVMDY | 2358 |
| 125 | SYGVH | 1331 | VIWRGGSTDYNAAFMS | 1845 | NLYGHYVMDY | 2359 |
| 126 | SYGVH | 1332 | VIWRGGSTDNNAAFMS | 1846 | NLYGHYVMDY | 2360 |
| 127 | RYGVH | 1333 | VIWRGGSTDHNAAFMS | 1847 | NLYGHYVMDY | 2361 |
| 128 | TYGVH | 1334 | VIWRGGSTDYNAAFMS | 1848 | NLYGHYVMDY | 2362 |
| 129 | SYGVH | 1335 | VIWRGGSTDYNAAFMS | 1849 | NLYGHYVMDY | 2363 |
| 130 | RYGVH | 1336 | VIWRGGSTDHNAAFMS | 1850 | NLYGHYVMDY | 2364 |
| 59 | SYGVH | 1337 | VIWRGGSTDYNAAFMS | 1851 | NLYGHYVMDY | 2365 |
| 60 | SYGVH | 1338 | VIWRGGSTDYNAAFMS | 1852 | NLYGHYVMDY | 2366 |
| 61 | SYGVH | 1339 | VIWRGGSTDNNAAFMS | 1853 | NLYGHYVMDY | 2367 |
| 62 | RYGVH | 1340 | VIWRGGSTDHNAAFMS | 1854 | NLYGHYVMDY | 2368 |
| 63 | TYGVH | 1341 | VIWRGGSTDYNAAFMS | 1855 | NLYGHYVMDY | 2369 |
| 131 | SYWMH | 1342 | MIHPNSGSTNYNEKFKS | 1856 | WGDGYSFAY | 2370 |
| 132 | SYWMH | 1343 | MIHPNSGSTNYNEKFKS | 1857 | WGDGYSFAY | 2371 |
| 133 | TYWMH | 1344 | MIHPNSDNTNYNEKFKS | 1858 | WGDGYSFAY | 2372 |
| 14 | SYWMH | 1345 | MIHPNSGTTNYNEKFKS | 1859 | WGDGYSFAY | 2373 |
| 134 | SYWMH | 1346 | MIHPNSGNTNYNEKFKS | 1860 | WGDGYSFAY | 2374 |
| 64 | SYWMH | 1347 | MIHPNSGSTNYNEKFKS | 1861 | WGDGYSFAY | 2375 |
| 65 | SYWMH | 1348 | MIHPNSGTTNYNEKFKS | 1862 | WGDGYSFAY | 2376 |
| 135 | DYVIN | 1349 | EIYPGSGSTYYNEKFKG | 1863 | RGERGPWFAY | 2377 |
| 136 | DYVIN | 1350 | EIYPGSGSSYYNEKFKG | 1864 | RGERGPWFAY | 2378 |
| 137 | DYVIN | 1351 | EIYPGSGSSYYNEKFRG | 1865 | RGERGPWFAY | 2379 |
| 138 | DYVIN | 1352 | EIYPGSGSSYYNEKFKG | 1866 | RGERGPWFAY | 2380 |
| 15 | DYVIN | 1353 | EIYPGSGSSYYNEKFKG | 1867 | RGERGPWFAY | 2381 |
| 66 | DYVIN | 1354 | EIYPGSGSTYYNEKFKG | 1868 | RGERGPWFAY | 2382 |
| 67 | DYVIN | 1355 | EIYPGSGSSYYNEKFKG | 1869 | RGERGPWFAY | 2383 |
| 68 | DYVIN | 1356 | EIYPGSGSSYYNEKFRG | 1870 | RGERGPWFAY | 2384 |
| 69 | DYVIN | 1357 | EIYPGSGSSYYNEKFKG | 1871 | RGERGPWFAY | 2385 |
| 24 | NYWMN | 1358 | LIDPSDSETHYNQVFKD | 1872 | YDVYYRFAY | 2386 |
| 139 | NYWMN | 1359 | MIDPSDSETHYNQMFKD | 1873 | YDGYYRFAY | 2387 |
| 140 | NYWMN | 1360 | MIDPSDSETHFNQMFKD | 1874 | YDIYYRFAY | 2388 |
| 16 | SYWMH | 1361 | MIHPNSGSTNYNEKFKS | 1875 | PGGYGFVY | 2389 |
| 141 | SYWMH | 1362 | MIHPNSDSTNYNEKFKS | 1876 | PGGYGFAD | 2390 |
| 142 | TYWMH | 1363 | MIHPNSGSTNYNEKFKS | 1877 | PGGYGFTY | 2391 |
| 143 | SYWMH | 1364 | MIHPNSGSPNYNEKFKS | 1878 | PGGYGFAY | 2392 |
| 70 | SYWMH | 1365 | MIHPNSGSPNYNEKFKS | 1879 | PGGYGFAY | 2393 |
| 25 | SYWIN | 1366 | NIYPSDSYTNYNQKFKD | 1880 | GNYIDY | 2394 |
| 144 | SYWIN | 1367 | NIYPSDSYTNYNQKFKD | 1881 | GNYIDY | 2395 |
| 145 | DYWIN | 1368 | NIYPSDSYTNYNQKFKD | 1882 | GNYIDY | 2396 |
| 146 | DYVIS | 1369 | EIYPGSGSSYYNEKFKG | 1883 | PGDLGFAY | 2397 |
| 147 | DYVIS | 1370 | EIYPGSGSNYYNEKFKG | 1884 | PGDLGFAY | 2398 |
| 148 | DYVIS | 1371 | EIYPGSGSSYYNEKFKG | 1885 | PGDLGFAY | 2399 |
| 71 | DYVIS | 1372 | EIYPGSGSSYYNEKFKG | 1886 | PGDLGFAY | 2400 |
| 72 | DYVIS | 1373 | EIYPGSGSSYYNEKFKG | 1887 | PGDLGFAY | 2401 |
| 73 | DYVIS | 1374 | EIYPGSGSNYYNEKFKG | 1888 | PGDLGFAY | 2402 |
| 74 | DYVIS | 1375 | EIYPGSGSSYYNEKFKG | 1889 | PGDLGFAY | 2403 |
| 74 | DYVIS | 1375 | EIYPGSGSSYYNEKFKG | 1889 | PGDLGFAY | 2403 |
| 75 | DYVIS | 1376 | EIYPGSGSSYYNEKFKG | 1890 | PGDLGFAY | 2404 |
| 75 | DYVIS | 1376 | EIYPGSGSSYYNEKFKG | 1890 | PGDLGFAY | 2404 |
| 76 | DYVIS | 1377 | EIYPGSGSSYYNEKFKG | 1891 | PGDLGFAY | 2405 |
| 149 | NYGVH | 1378 | VVWAGGITNYNWALMS | 1892 | GDGYDDGYAMDY | 2406 |
| 150 | SYGVH | 1379 | VLWAGGITNYNSALMS | 1893 | GDGYDDGYAMDY | 2407 |
| 26 | SYGVH | 1380 | VIWAGGTTNYNSALMS | 1894 | GDGYDDGYAMDY | 2408 |
| 77 | NYGVH | 1381 | VVWAGGITNYNWALMS | 1895 | GDGYDDGYAMDY | 2409 |
| 78 | SYGVH | 1382 | VLWAGGITNYNSALMS | 1896 | GDGYDDGYAMDY | 2410 |
| 79 | SYGVH | 1383 | VIWAGGTTNYNSALMS | 1897 | GDGYDDGYAMDY | 2411 |
| 151 | SYWMY | 1384 | MIDPSDSETRLNQKFKD | 1898 | TRNY | 2412 |
| 152 | SYWMY | 1385 | MIDPSDSETRLNQKFKD | 1899 | TRNY | 2413 |
| 153 | SYWMY | 1386 | MIDPSDSETRLNQKFKD | 1900 | TRNY | 2414 |
| 154 | DYYMH | 1387 | WIDPENGDTEYAPKFQG | 1901 | PLLRYSSAMDY | 2415 |
| 155 | DYYIH | 1388 | WIDPENGDTEYAPKFQG | 1902 | PLLRYSSSMDY | 2416 |
| 156 | DYYMH | 1389 | WIDPENGDTEYAPKFQG | 1903 | ALLRYSSAMDY | 2417 |
| 80 | DYYMH | 1390 | WIDPENGDTEYAPKFQG | 1904 | PLLRYSSAMDY | 2418 |
| 81 | DYYIH | 1391 | WIDPENGDTEYAPKFQG | 1905 | PLLRYSSSMDY | 2419 |
| 82 | DYYMH | 1392 | WIDPENGDTEYAPKFQG | 1906 | ALLRYSSAMDY | 2420 |
| 17 | DTSLH | 1393 | RIDPANGNTKYDPKFQG | 1907 | GPDDGYFYYYSMD | 2421 |
| | | | | | Y | |
| 157 | NYYVY | 1394 | EINPSNGDTNFNEKFKS | 1908 | YYTHEAYYYAMDC | 2422 |
| 27 | TYYIY | 1395 | EINPSNGGTNFNEKFKS | 1909 | YYTHETYYYAMDY | 2423 |
| 158 | DYYMH | 1396 | RIDPEDGDTEYAPKFQG | 1910 | YSIYDAMDY | 2424 |
| 159 | DYVIS | 1397 | EIYPGSGSTYYNEKFKG | 1911 | RGERGPWFAY | 2425 |
| 83 | DYVIS | 1398 | EIYPGSGSTYYNEKFKG | 1912 | RGERGPWFAY | 2426 |
| 160 | DYGMH | 1399 | VISTYYGDASYNQKFKG | 1913 | QMDYDYTYYYAMD | 2427 |
| | | | | | Y | |
| 28 | SYWMQ | 1400 | EIDPSDSYTNYNQKFKG | 1914 | AEYGYGNYPWFAY | 2428 |
| 84 | SYWMQ | 1401 | EIDPSDSYTNYNQKFKG | 1915 | AEYGYGNYPWFAY | 2429 |
| 29 | SYWMH | 1402 | RIHPSDSDTNYNQKFKG | 1916 | PYYYGGWYFDV | 2430 |
| 161 | DYVIS | 1403 | EIYPGSGSTYYNEKFKG | 1917 | MDGPWFAY | 2431 |
| 30 | SYGMS | 1404 | TISSGGSYTYYPDSVKG | 1918 | LYDAHWDYFDY | 2432 |
| 162 | TSGMG | 1405 | SIWNNDNYYNPSLKS | 1919 | RPYYRYDSFAY | 2433 |
| 18 | NYGMN | 1406 | WINTYTGEPTYADDFKG | 1920 | KYYDYEFAY | 2434 |
| 85 | NYGMN | 1407 | WINTYTGEPTYADDFKG | 1921 | KYYDYEFAY | 2435 |
| 163 | DYEMH | 1408 | AIDPETGGTAYNQKFKV | 1922 | LGDYDVMDY | 2436 |
| 86 | DYEMH | 1409 | AIDPETGGTAYNQKFKV | 1923 | LGDYDVMDY | 2437 |
| 164 | SYWMH | 1410 | EIDPSDSYTNYNQKFKG | 1924 | AGRYGSSFDY | 2438 |
| 165 | TSGMG | 1411 | HIYWDDDKRYNPSLKS | 1925 | RPDDYDGAWFPY | 2439 |
| 31 | SSWMH | 1412 | EIHPNSGNTNYNEKFKG | 1926 | YYDYDAYYFDY | 2440 |
| 87 | SSWMH | 1413 | EIHPNSGNTNYNEKFKG | 1927 | YYDYDAYYFDY | 2441 |
| 32 | SYWMH | 1414 | MIHPNSGSTNYNEKFKS | 1928 | PYYGYDVGY | 2442 |
| 166 | DYVIS | 1415 | EIYPGSGSNYYNEKFKG | 1929 | EEKIYFDY | 2443 |
| 88 | DYVIS | 1416 | EIYPGSGSNYYNEKFKG | 1930 | EEKIYFDY | 2444 |
| 167 | SYWMH | 1417 | MIHPNSGSTNYNEKFKS | 1931 | YDGYWFDY | 2445 |
| 168 | SYWMH | 1418 | AIYPGNSDTTYNQKFKG | 1932 | LITTAYYFDY | 2446 |
| 89 | SYWMH | 1419 | AIYPGNSDTTYNQKFKG | 1933 | LITTAYYFDY | 2447 |
| 169 | SYWMH | 1420 | MIHPNSGSTNYNEKFKS | 1934 | ETGDYGSSYVWYF | 2448 |
| | | | | | DV | |
| 170 | DYVIS | 1421 | EIYPGSGSTYYNEKFKG | 1935 | GKVTRFAY | 2449 |
| 171 | SYAMS | 1422 | TISDGGSYTYYPDNVKG | 1936 | DQDSNWEYFDY | 2450 |
| 172 | DYSMH | 1423 | WINTETGEPTYADDFKG | 1937 | ESWDRAMDY | 2451 |
| 19 | SYAMS | 1424 | TISSGGSYTYYPDSVKG | 1938 | HEEANWAWFAY | 2452 |
| 90 | SYAMS | 1425 | TISSGGSYTYYPDSVKG | 1939 | HEEANWAWFAY | 2453 |
| 173 | NYWMH | 1426 | MIDPSDSETRLNQQFKD | 1940 | PYYAMDY | 2454 |
| 91 | NYWMH | 1427 | MIDPSDSETRLNQQFKD | 1941 | PYYAMDY | 2455 |
| 174 | SSWMH | 1428 | EIHPNSGNTNYNEKNKG | 1942 | YYGNYVWYFDV | 2456 |
| 92 | SSWMH | 1429 | EIHPNSGNTNYNEKNKG | 1943 | YYGNYVWYFDV | 2457 |
| 175 | SYWMH | 1430 | MIHPNSGSTNYNEKFKS | 1944 | YGSSYWYFDV | 2458 |
| 93 | SYWMH | 1431 | MIHPNSGSTNYNEKFKS | 1945 | YGSSYWYFDV | 2459 |
| 20 | SYGVH | 1432 | VIWSGGSTDYNAAFIS | 1946 | YYGSSRSYWYLDV | 2460 |
| 94 | SYGVH | 1433 | VIWSGGSTDYNAAFIS | 1947 | YYGSSRSYWYLDV | 2461 |
| 176 | SYNMH | 1434 | ALYSGNGDTSYNQKFK | 1948 | DYYGSSHLWYFDV | 2462 |
| | | | G | | | |
| 177 | TSGMG | 1435 | HIYWDDDKRYNPSLKS | 1949 | RAHYDYGWYFDV | 2463 |
| 178 | SYWMH | 1436 | MIHPNSGSTNYNEKFKS | 1950 | YDYDWYFDV | 2464 |
| 33 | SYGMS | 1437 | TISSGGSYTYYPDSVKG | 1951 | HDDSSYDWFAY | 2465 |
| 179 | SYGMS | 1438 | TISSGGSYTYYPDSVKG | 1952 | HEDSNYHYFDY | 2466 |
| 34 | NYWMH | 1439 | MIHPNSGTTNYNEKFKS | 1953 | FGDGYHFDY | 2467 |
| 180 | SYGMS | 1440 | TISSGGSYTYYPDSVKG | 1954 | QNDSSWAWFAY | 2468 |
| 95 | SYGMS | 1441 | TISSGGSYTYYPDSVKG | 1955 | QNDSSWAWFAY | 2469 |
| 181 | SYWMH | 1442 | MIHPNSGSTNYNEKFKS | 1956 | PYSNYGWYFDV | 2470 |
| 96 | SYWMH | 1443 | MIHPNSGSTNYNEKFKS | 1957 | PYSNYGWYFDV | 2471 |
| 182 | SYWMH | 1444 | NIDPSDSETHYNQKFKD | 1958 | DYYGSYWYFDV | 2472 |
| 97 | SYWMH | 1445 | NIDPSDSETHYNQKFKD | 1959 | DYYGSYWYFDV | 2473 |
| 183 | DYYMH | 1446 | RIDPEDGETKYAPKFQG | 1960 | YGNSAWFAY | 2474 |
| 98 | DYYMH | 1447 | RIDPEDGETKYAPKFQG | 1961 | YGNSAWFAY | 2475 |
| 35 | NYGMN | 1448 | WINTNTGEPTYAEEFKG | 1962 | WYPYFDY | 2476 |
| 99 | NYGMN | 1449 | WINTNTGEPTYAEEFKG | 1963 | WYPYFDY | 2477 |
| 100 | NYGMN | 1450 | WINTNTGEPTYAEEFKG | 1964 | WYPYFDY | 2478 |
| 36 | SYWMH | 1451 | YINPSSGYTKYNQKFKD | 1965 | SDGSSGNWYFDV | 2479 |
| 101 | SYWMH | 1452 | YINPSSGYTKYNQKFKD | 1966 | SDGSSGNWYFDV | 2480 |
| 184 | SYGVH | 1453 | VIWAGGSTNYNSALMS | 1967 | EGGYTGYFDV | 2481 |
| 102 | SYGVH | 1454 | VIWAGGSTNYNSALMS | 1968 | EGGYTGYFDV | 2482 |
| 185 | SYWMH | 1455 | NIDPSDSETHYNQKFKD | 1969 | SNYVPYYAMDY | 2483 |
| 103 | SYWMH | 1456 | NIDPSDSETHYNQKFKD | 1970 | SNYVPYYAMDY | 2484 |
| 186 | DYVIS | 1457 | EIYPGSGSAYYNEKFKG | 1971 | RGFDY | 2485 |
| 21 | SYGMS | 1458 | TISSGGSYTYYPDSVKG | 1972 | HNYSNWDWFAY | 2486 |
| 187 | SYWMH | 1459 | MIHPNSGSTNYNEKFKS | 1973 | DYYGSGYGYYFDY | 2487 |
| 188 | SYWMH | 1460 | MIHPNSGSTNYNEKFKS | 1974 | DYYGSSYGWYFDV | 2488 |
| 189 | SYWMH | 1461 | MIHPNSGSTNYNEKFKS | 1975 | DYYGSSYGWYFDV | 2489 |
| 190 | SYWMH | 1462 | MIHPNSGSTNYNEKFKS | 1976 | DYYGSSYGWYFDV | 2490 |
| 191 | SYWMH | 1463 | MIHPNSGSTNYNEKFKS | 1977 | DYYGSSYGWYFDV | 2491 |
| 192 | SYWMH | 1464 | MIHPNSGSTNYNEKFKS | 1978 | DYYGSGYGWYFD | 2492 |
| | | | | | V | |
| 193 | NYWMN | 1465 | MIDPSDSETHYNQMFKD | 1979 | YDGYYRFAY | 2493 |
| 194 | NYWMN | 1466 | MIDPSDSETHFNQMFKD | 1980 | YDVYYRFAY | 2494 |
| 195 | SYWMH | 1467 | MIHPNSGSTNYNEKFKS | 1981 | DYGNYDYAMDY | 2495 |
| 104 | SYWMH | 1468 | MIHPNSGSTNYNEKFKS | 1982 | DYGNYDYAMDY | 2496 |
| 37 | SYWMH | 1469 | MIHPNSGSTNYNEKFKS | 1983 | DYGNYDYAMDY | 2497 |
| 196 | SYWMH | 1470 | MIHPNSGSTNYNEKFKS | 1984 | DYGNYDYAMDY | 2498 |
| 197 | SYGMS | 1471 | TISSGGSYTYYPDSVKG | 1985 | QLTGTWYYFDY | 2499 |
| 198 | SYGMS | 1472 | TISSGGSYTYYPDSVKG | 1986 | QLTGTWYYFDY | 2500 |
| 199 | SYGMS | 1473 | TISSGGSYTYYPDSVKG | 1987 | QLTGTWYYFDY | 2501 |
| 22 | DTSLH | 1474 | RIDPANGNTKYDPKFQG | 1988 | GPDDGYFYYYSMD | 2502 |
| | | | | | Y | |
| 200 | NYYMS | 1475 | VINSNGGSTYYPDTVKG | 1989 | QEGIGYAMDY | 2503 |
| 201 | EYTMH | 1476 | GIYPNNGGTSYNQKFKG | 1990 | GGWLLGY | 2504 |
| 202 | SYGVH | 1477 | VIWSGGSTDYNAAFIS | 1991 | DGGIRGAMDY | 2505 |
| 203 | SYWIE | 1478 | EILPGSGSTNYNEKFKG | 1992 | RGYGYDEGFDY | 2506 |
| 204 | DYEMH | 1479 | AIDPETGGTAYNQKFKG | 1993 | NYDYAMDY | 2507 |
| 205 | SYYMS | 1480 | VINSNGGSTFYPDTVKG | 1994 | QEGIGYALDY | 2508 |
| 206 | SYAMS | 1481 | AISSGGSTYYPDSVKG | 1995 | EREWGVYYGSSLD | 2509 |
| | | | | | Y | |
| 207 | DTYMH | 1482 | RIDPANGNTKYDPKFQG | 1996 | SDGNYD | 2510 |
| 208 | NYYMS | 1483 | VINSNGGSTYYPDTVKG | 1997 | QEGIGYGMDY | 2511 |
| 209 | TYVMN | 1484 | RIRSKSDNYATYYADSV | 1998 | HDGVVGFDV | 2512 |
| | | | KD | | | |
| 210 | SGYYW | 1485 | YISYDGSNNYNPSLKN | 1999 | GGGRG | 2513 |
| 211 | DYSMH | 1486 | WINTETGEPTYADDFKG | 2000 | DYYDYYYAMDY | 2514 |
| 212 | DYSMH | 1487 | WINTETGEPTYADDFKG | 2001 | ESWDRAMDY | 2515 |
| 213 | NYWMN | 1488 | RIDPYDSETHYNQKFKD | 2002 | IYSDYDGAWFAY | 2516 |
| 214 | DYYMD | 1489 | RVNPYNGGTSYNQKFK | 2003 | GTVGFAY | 2517 |
| | | | G | | | |
| 215 | SYAMS | 1490 | SISSGGSTYYPDSVKG | 2004 | EREWGVFYGSSLD | 2518 |
| | | | | | Y | |
| 216 | SYAMS | 1491 | TISSGGSYTYYPDSVKG | 2005 | HDDSSYGYFDY | 2519 |
| 217 | NYAMS | 1492 | SISSGGTTYYPDSVKG | 2006 | TMPDV | 2520 |
| 218 | SYGVH | 1493 | VIWAGGSTNYNSALMS | 2007 | DTDGYYWAMDY | 2521 |
| 219 | SDHAW | 1494 | YISYSGSTTYNPSLKS | 2008 | KWGDY | 2522 |
| 220 | DYEMH | 1495 | AIDPETGGTAYNQKFKG | 2009 | NYDYALDY | 2523 |
| 221 | SGYYW | 1496 | YISYDGSNDYNPSLKN | 2010 | GGGRG | 2524 |
| 222 | NYYMS | 1497 | VINSNGGSTYYPDTVKG | 2011 | QEEIGYAMDY | 2525 |
| 223 | DYFMH | 1498 | WIDPETDNTIYDPKFQG | 2012 | SGNMGFTY | 2526 |
| 105 | DYFMH | 1499 | WIDPETDNTIYDPKFQG | 2013 | SGNMGFTY | 2527 |
| 224 | SYAMS | 1500 | TISSGGSYTYYPDSVKG | 2014 | QGGSSWGAMDY | 2528 |
| 106 | SYAMS | 1501 | TISSGGSYTYYPDSVKG | 2015 | QGGSSWGAMDY | 2529 |
| 225 | SYAMS | 1502 | TISNGGSYTYYPDSVKG | 2016 | HEITTRFAY | 2530 |
| 226 | SGYYW | 1503 | YMSYDGSNNYNPSLKN | 2017 | EAGYFDY | 2531 |
| 227 | TYAMN | 1504 | RIRSKSNNYATYYADSV | 2018 | QYGYDFDY | 2532 |
| | | | KD | | | |
| 228 | SYGMS | 1505 | TISSGGSYTYYPDSVKG | 2019 | HKGVNWDYFDY | 2533 |
| 229 | DYEMH | 1506 | AIDPETGGTAYNQKFKG | 2020 | GDGNYDSWYFDV | 2534 |
| 230 | SYAMS | 1507 | TISSGGSYTYYPDSVKG | 2021 | LPVTTVVFDY | 2535 |
| 231 | SYAMS | 1508 | TISSGGSYTYYPDSVKG | 2022 | RPVVVPFDY | 2536 |
| 232 | SYGVH | 1509 | VIWSGGSTDYNAAFIS | 2023 | GWDADYFDY | 2537 |
| 233 | NYWMH | 1510 | MIHPNSGSTNYNEKFKS | 2024 | YDYDDY | 2538 |
| 234 | DYYMN | 1511 | DINPNNGGTSYNQKFKG | 2025 | SELGLYAMDY | 2539 |
| 235 | GYWIE | 1512 | EILPGSGSTNYNEKFKG | 2026 | GRIHYFDY | 2540 |
| 236 | GYWIE | 1513 | EILPGSGSTNYNEKFKG | 2027 | GRIHYFDY | 2541 |
| 237 | SYGVH | 1514 | VIWSGGSTDYNAAFIS | 2028 | KGYGYDWYFDV | 2542 |
| 107 | SYGVH | 1515 | VIWSGGSTDYNAAFIS | 2029 | KGYGYDWYFDV | 2543 |
| 238 | SYWMH | 1516 | EIDPSDSYTNYNQKFKG | 2030 | SSYYYYAMDY | 2544 |
| 108 | SYWMH | 1517 | EIDPSDSYTNYNQKFKG | 2031 | SSYYYYAMDY | 2545 |
| 239 | SGYYW | 1518 | YISYDGSNNYNPSLKN | 2032 | GGGRD | 2546 |
| 240 | SYGVH | 1519 | VIWSGGSTDYNAAFIS | 2033 | GGDYDSYAMDY | 2547 |
| 241 | SYWIT | 1520 | DIYPGSGSTNYNEKFKS | 2034 | ESVYDGYSWYFDV | 2548 |
| 242 | DYNMN | 1521 | VINPNYGTTSYNQKFKG | 2035 | TYDYDDWYFDV | 2549 |
| 243 | SYWMH | 1522 | EIDPSDSYTNYNQKFKG | 2036 | SGNYLYAMDY | 2550 |
| 244 | DYNMN | 1523 | VINPNYGTTSYNQKFKG | 2037 | EGTSWYFDV | 2551 |
| 245 | SYGVH | 1524 | VIWRGGSTDYNAAFMS | 2038 | KGDGYDWYFDV | 2552 |
| 246 | SYGVH | 1525 | VIWSGGSTDYNAAFIS | 2039 | EGNYGSSYDAMDY | 2553 |
| 247 | SYWMH | 1526 | EIDPSDSYTNYNQKFKG | 2040 | SSNYPYAMDY | 2554 |
| 248 | NTYMH | 1527 | RIDPANGNTKYAPKFQG | 2041 | YSGLY | 2555 |
| 249 | SYWMH | 1528 | NIDPSDSETHYNQKFKD | 2042 | RGQIYYGYSWFAY | 2556 |
| 250 | DYYMN | 1529 | DINPNNGGTSYNQKFKG | 2043 | STVVADWYFDV | 2557 |
| 251 | SYGIS | 1530 | EIYPRSGNTYYNEKFKG | 2044 | SGSSYGYFDV | 2558 |
| 252 | SYGVH | 1531 | VIWSGGSTDYNAAFIS | 2045 | KGGYDAYAMDY | 2559 |
| 253 | DYNMN | 1532 | VINPNYGTTSYNQKFKG | 2046 | EGFITTVVAVDY | 2560 |
| 254 | DYEMH | 1533 | AIDPETGGTAYNQKFKG | 2047 | EGNYDAMDY | 2561 |
| 255 | SYWMH | 1534 | VIDPSDSYTNYNQKFKG | 2048 | WDYYGVDY | 2562 |
| 256 | GYWMY | 1535 | AISPGGGSTYYPDSVKG | 2049 | SLTATHTYEYDY | 2563 |
| 388 | FNAMG | 14116 | TIARAGATKYADSVKG | 14117 | RVFDLPNDY | 14118 |
| 389 | SYSMG | 9249 | AISWSGDETSYADSVKG | 9252 | DRWWRPAGLQWDY | 9255 |
| 390 | FNAMG | 9250 | TIARAGATKYADSVKG | 9253 | RVFDLPNDY | 9256 |
| 391 | VMG | | AVRWSSTGIYYTQYADSVKS | 9254 | DTYNSNPARWDGYDF | 9257 |
| | LCDR1 | | LCDR2 | | LCDR3 | |
| Binder | | SEQ ID | | SEQ ID | | SEQ ID |
| Name | Sequence | NO: | Sequence | NO: | Sequence | NO: |
| 109 | KASQDIN- | 5644 | RANRLVD | 6154 | LHYDEFPPT | 6664 |
| | SYLS | | | | | |
| 110 | KASQDIN- | 5645 | RANRLVD | 6155 | LQYDEFPPT | 6665 |
| | SYLN | | | | | |
| 111 | KASQDIN- | 5646 | RANRLVD | 6156 | LQYDEFPPT | 6666 |
| | SYLS | | | | | |
| 112 | KASQDIN- | 5647 | RANRLVD | 6157 | LQYDEFPPT | 6667 |
| | SYLS | | | | | |
| 1 | KASQDIN- | 5648 | RANRLVD | 6158 | LQYDEFPPT | 6668 |
| | SYLS | | | | | |
| 113 | KASQDIN- | 5649 | RANRLVD | 6159 | PQYVESPPT | 6669 |
| | SYLS | | | | | |
| 114 | KASQDIN- | 5650 | RANRLVD | 6160 | LQYDEFPPT | 6670 |
| | SYLS | | | | | |
| 115 | KASQDIN- | 5651 | RANRLVD | 6161 | LQYDEFPPT | 6671 |
| | SYLS | | | | | |
| 23 | KASQDIN- | 5652 | RANRLVD | 6162 | LQYDEFPPT | 6672 |
| | SYLS | | | | | |
| 116 | KASQDIN- | 5653 | RANRLVD | 6163 | LQYDEFPPT | 6673 |
| | SYLS | | | | | |
| 117 | KASQDIN- | 5654 | RANRLVD | 6164 | LQYDEFPLT | 6674 |
| | SYLS | | | | | |
| 2 | KASQDIN- | 5655 | RANRLVD | 6165 | LQYDEFPPT | 6675 |
| | SYLS | | | | | |
| 118 | KASQDIN- | 5656 | RANRLVD | 6166 | LQYDEFPPT | 6676 |
| | GYLS | | | | | |
| 119 | KASQDIN- | 5657 | RANRLVD | 6167 | LQYDEFPPT | 6677 |
| | SYLS | | | | | |
| 120 | KASQDIN- | 5658 | RANRLVD | 6168 | LQYDEFPPT | 6678 |
| | SYLS | | | | | |
| 121 | KASQDIN- | 5659 | RANRLVD | 6169 | LQYDEFPPT | 6679 |
| | SYLN | | | | | |
| 122 | KASQDIN- | 5660 | RANRLVD | 6170 | LQYDEFPPT | 6680 |
| | SYLS | | | | | |
| 123 | KASQDIN- | 5661 | RAKRLVD | 6171 | LQYDEFPPT | 6681 |
| | SYLS | | | | | |
| 38 | ASQDIN- | 5662 | RANRLVD | 6172 | LQYDEFPLT | 6682 |
| | SYLS | | | | | |
| 39 | ASQDIN- | 5663 | RANRLVD | 6173 | LQYDEFPPT | 6683 |
| | GYLS | | | | | |
| 40 | ASQDIN- | 5664 | RAKRLVD | 6174 | LQYDEFPPT | 6684 |
| | SYLS | | | | | |
| 41 | ASQDIN- | 5665 | RANRLVD | 6175 | LQYDEFPPT | 6685 |
| | GYLS | | | | | |
| 42 | ASQDIN- | 5666 | RAKRLVD | 6176 | LQYDEFPPT | 6686 |
| | SYLS | | | | | |
| 43 | ASQDIN- | 5667 | RANRLVD | 6177 | LHYDEFPPT | 6687 |
| | SYLS | | | | | |
| 44 | ASQDIN- | 5668 | RANRLVD | 6178 | LQYDEFPPT | 6688 |
| | SYLS | | | | | |
| 45 | ASQDIN- | 5669 | RANRLVD | 6179 | LQYDEFPPT | 6689 |
| | SYLS | | | | | |
| 46 | ASQDIN- | 5670 | RANRLVD | 6180 | LQYDEFPPT | 6690 |
| | SYLS | | | | | |
| 47 | ASQDIN- | 5671 | RANRLVD | 6181 | LQYDEFPPT | 6691 |
| | SYLS | | | | | |
| 48 | ASQDIN- | 5672 | RANRLVD | 6182 | LQYDEFPPT | 6692 |
| | SYLS | | | | | |
| 49 | ASQDIN- | 5673 | RANRLVD | 6183 | LQYDEFPPT | 6693 |
| | SYLS | | | | | |
| 50 | ASQDIN- | 5674 | RANRLVD | 6184 | LQYDEFPPT | 6694 |
| | SYLS | | | | | |
| 51 | ASQDIN- | 5675 | RANRLVD | 6185 | LQYDEFPPT | 6695 |
| | SYLS | | | | | |
| 52 | ASQDIN- | 5676 | RANRLVD | 6186 | LQYDEFPPT | 6696 |
| | SYLS | | | | | |
| 53 | ASQDIN- | 5677 | RANRLVD | 6187 | LQYDEFPPT | 6697 |
| | SYLN | | | | | |
| 54 | ASQDIN- | 5678 | RANRLVD | 6188 | LQYDEFPPT | 6698 |
| | SYLS | | | | | |
| 55 | ASQDIN- | 5679 | RANRLVD | 6189 | LQYDEFPPT | 6699 |
| | SYLS | | | | | |
| 56 | ASQDIN- | 5680 | RANRLVD | 6190 | LQYDEFPPT | 6700 |
| | SYLS | | | | | |
| 3 | RASENIYS | 5681 | AATYLAD | 6191 | QHFWGTPWT | 6701 |
| | NLA | | | | | |
| 4 | RASENIYS | 5682 | AATNLAD | 6192 | QHFWGTPWT | 6702 |
| | NLA | | | | | |
| 5 | RASENIYS | 5683 | AATNLAD | 6193 | QHFWGSPWT | 6703 |
| | NLA | | | | | |
| 6 | RASENIYS | 5684 | AATNLAD | 6194 | QHFWGTPWT | 6704 |
| | NLA | | | | | |
| 7 | RASENIYS | 5685 | AATNLAD | 6195 | QHFWGTPWT | 6705 |
| | NLA | | | | | |
| 8 | RASENIYS | 5686 | AATNVAD | 6196 | QHFWGTPWT | 6706 |
| | NLA | | | | | |
| 9 | RAS- | 5687 | AATNLAD | 6197 | QHFWGTPWT | 6707 |
| | DNIYSNLA | | | | | |
| 10 | RASENIYS | 5688 | AATNLAD | 6198 | QHFWGTPWT | 6708 |
| | NLA | | | | | |
| 11 | RASENIYS | 5689 | AATNLAD | 6199 | QHFWGTPWT | 6709 |
| | NLA | | | | | |
| 12 | RASENIYS | 5690 | AATYLAD | 6200 | QHFWGTPWT | 6710 |
| | NLA | | | | | |
| 13 | RASENIYS | 5691 | AATNLAD | 6201 | QHFWGSPWT | 6711 |
| | NLA | | | | | |
| 57 | AS- | 5692 | AATNLAD | 6202 | QHFWGTPWT | 6712 |
| | DNIYSNLA | | | | | |
| 58 | ASENIYSN | 5693 | AATYLAD | 6203 | QHFWGTPWT | 6713 |
| | LA | | | | | |
| 124 | KASQDIN- | 5694 | RANRLVD | 6204 | LQYDEFPPT | 6714 |
| | SYLS | | | | | |
| 125 | KASEN- | 5695 | GASNRYT | 6205 | GQSYSYPFT | 6715 |
| | VVTYVS | | | | | |
| 126 | KASEN- | 5696 | GASNRYT | 6206 | GQSYSYPFT | 6716 |
| | VVTYVS | | | | | |
| 127 | KASEN- | 5697 | GASNRYT | 6207 | GQSYSYPFT | 6717 |
| | VVTYVS | | | | | |
| 128 | KASEN- | 5698 | GASNRYT | 6208 | GQSYSYPFT | 6718 |
| | VVTYVS | | | | | |
| 129 | KASEN- | 5699 | GASNRYT | 6209 | GQSYSYLIH | 6719 |
| | VVTYVS | | | | | |
| 130 | KASEN- | 5700 | GASNRYT | 6210 | GQSYSYLIH | 6720 |
| | VVTYVS | | | | | |
| 59 | ASQDIN- | 5701 | RANRLVD | 6211 | LQYDEFPPT | 6721 |
| | SYLS | | | | | |
| 60 | ASEN- | 5702 | GASNRYT | 6212 | GQSYSYPFT | 6722 |
| | VVTYVS | | | | | |
| 61 | ASEN- | 5703 | GASNRYT | 6213 | GQSYSYPFT | 6723 |
| | VVTYVS | | | | | |
| 62 | ASEN- | 5704 | GASNRYT | 6214 | GQSYSYPFT | 6724 |
| | VVTYVS | | | | | |
| 63 | ASEN- | 5705 | GASNRYT | 6215 | GQSYSYPFT | 6725 |
| | VVTYVS | | | | | |
| 131 | SASSSVSY | 5706 | DTSKLAS | 6216 | QQWSSNPLY | 6726 |
| | MH | | | | | |
| 132 | SASSSVSY | 5707 | DTSKLAS | 6217 | QQWSSNPHV | 6727 |
| | MH | | | | | |
| 133 | SASSSVSY | 5708 | DTSKLAS | 6218 | QQWSSNPLY | 6728 |
| | MH | | | | | |
| 14 | SASSSVSY | 5709 | DTSKLAS | 6219 | QQWSSNPLY | 6729 |
| | MH | | | | | |
| 134 | SASSSVSY | 5710 | DTSKLAS | 6220 | QQWSSNPLY | 6730 |
| | MH | | | | | |
| 64 | ASSSVSYM | 5711 | DTSKLAS | 6221 | QQWSSNPLY | 6731 |
| | H | | | | | |
| 65 | ASSSVSYM | 5712 | DTSKLAS | 6222 | QQWSSNPLY | 6732 |
| | H | | | | | |
| 135 | KASQSVD | 5713 | AASNLES | 6223 | QQSNEDPLT | 6733 |
| | YD- | | | | | |
| | GDSYMN | | | | | |
| 136 | KASQSVD | 5714 | AASNLES | 6224 | QQSNEDPLT | 6734 |
| | YD- | | | | | |
| | GDSYMN | | | | | |
| 137 | KASQSVD | 5715 | AASNLQS | 6225 | QQSNEDPLT | 6735 |
| | YD- | | | | | |
| | GDSYMN | | | | | |
| 138 | KASQSVD | 5716 | AASNLES | 6226 | QQSNEDPLT | 6736 |
| | YD- | | | | | |
| | GDSYMN | | | | | |
| 15 | KASQSVD | 5717 | AASNLES | 6227 | QQSNEDPLT | 6737 |
| | YD- | | | | | |
| | GDSYMN | | | | | |
| 66 | ASQSVDY | 5718 | AASNLES | 6228 | QQSNEDPLT | 6738 |
| | DGDSYMN | | | | | |
| 67 | ASQSVDY | 5719 | AASNLES | 6229 | QQSNEDPLT | 6739 |
| | DGDSYMN | | | | | |
| 68 | ASQSVDY | 5720 | AASNLQS | 6230 | QQSNEDPLT | 6740 |
| | DGDSYMN | | | | | |
| 69 | ASQSVDY | 5721 | AASNLES | 6231 | QQSNEDPLT | 6741 |
| | DGDSYMN | | | | | |
| 24 | KASQDINK | 5722 | YTSTLQP | 6232 | LQYDNLMYT | 6742 |
| | YIA | | | | | |
| 139 | KASQDINK | 5723 | YTSTLQP | 6233 | LQYDILMYT | 6743 |
| | YIA | | | | | |
| 140 | KASQDINK | 5724 | YTSTLQP | 6234 | LQYDILMYT | 6744 |
| | YIA | | | | | |
| 16 | QATQDIV- | 5725 | YATELAE | 6235 | LQFYEFPLT | 6745 |
| | KNLN | | | | | |
| 141 | QATQDIV- | 5726 | YATELAE | 6236 | LQFYEFPLT | 6746 |
| | KNLN | | | | | |
| 142 | QATQDIV- | 5727 | YATELAE | 6237 | LQFYEFPLT | 6747 |
| | KNLN | | | | | |
| 143 | QATQDIV- | 5728 | YATELAE | 6238 | LQFYEFPLT | 6748 |
| | KNLN | | | | | |
| 70 | ATQDIV- | 5729 | YATELAE | 6239 | LQFYEFPLT | 6749 |
| | KNLN | | | | | |
| 25 | RAS- | 5730 | YTSNLAP | 6240 | QQFTSSHTF | 6750 |
| | SSVNYMY | | | | | |
| 144 | RAS- | 5731 | YTSNLAP | 6241 | QQFTSSHTF | 6751 |
| | SSVNYMY | | | | | |
| 145 | RAS- | 5732 | YTSNLAP | 6242 | QQFTSSHTF | 6752 |
| | SSVNYMY | | | | | |
| 146 | KASQSVD | 5733 | AASNLES | 6243 | QQSNKDPLT | 6753 |
| | YD- | | | | | |
| | GDSYMN | | | | | |
| 147 | KASQSVD | 5734 | AASNLES | 6244 | QQSNEDPLT | 6754 |
| | YD- | | | | | |
| | GDSYMN | | | | | |
| 148 | KASQSVD | 5735 | AASNLES | 6245 | QQSNKDPFT | 6755 |
| | YD- | | | | | |
| | GDSYMN | | | | | |
| 71 | ASQSVDY | 5736 | AASNLES | 6246 | QQSNKDPLT | 6756 |
| | DGDSYMN | | | | | |
| 72 | ASQSVDY | 5737 | AASNLES | 6247 | QQSNKDPLT | 6757 |
| | DGDSYMN | | | | | |
| 73 | ASQSVDY | 5738 | AASNLES | 6248 | QQSNEDPLT | 6758 |
| | DGDSYMN | | | | | |
| 74 | ASQSVDY | 5739 | AASNLES | 6249 | QQSNKDPFT | 6759 |
| | DGDSYMN | | | | | |
| 75 | ASQSVDY | 5740 | AASNLES | 6250 | QQSNKDPFT | 6760 |
| | DGDSYMN | | | | | |
| 76 | ASQSVDY | 5741 | AASNLES | 6251 | QQSNKDPFT | 6761 |
| | DGDSYMN | | | | | |
| 149 | RASQSVST | 5742 | YASNLES | 6252 | QHSWEIPLT | 6762 |
| | SSYSYMH | | | | | |
| 150 | RASQSVST | 5743 | YASNLES | 6253 | QHSWEIPLT | 6763 |
| | SSYSYMH | | | | | |
| 26 | RASQSVST | 5744 | YASNLES | 6254 | QHSWEIPLT | 6764 |
| | SSYSYMH | | | | | |
| 77 | ASQSVSTS | 5745 | YASNLES | 6255 | QHSWEIPLT | 6765 |
| | SYSYMH | | | | | |
| 78 | ASQSVSTS | 5746 | YASNLES | 6256 | QHSWEIPLT | 6766 |
| | SYSYMH | | | | | |
| 79 | ASQSVSTS | 5747 | YASNLES | 6257 | QHSWEIPLT | 6767 |
| | SYSYMH | | | | | |
| 151 | RASQDISN | 5748 | STSRLHS | 6258 | QQGNTLPWT | 6768 |
| | YLN | | | | | |
| 152 | RASQDISN | 5749 | STSRLHS | 6259 | QQGNALPWT | 6769 |
| | YLN | | | | | |
| 153 | RASQDISN | 5750 | STSRLHS | 6260 | QQGNTLPWT | 6770 |
| | YLN | | | | | |
| 154 | RSST- | 5751 | GTSNRAP | 6261 | ALWYSTHYV | 6771 |
| | GAVTTSN | | | | | |
| | YAN | | | | | |
| 155 | RSST- | 5752 | GTSNRAP | 6262 | ALWYSTHYV | 6772 |
| | GAVTTSN | | | | | |
| | YAN | | | | | |
| 156 | RSST- | 5753 | GTSNRAP | 6263 | ALWYSTHYV | 6773 |
| | GAVTTSN | | | | | |
| | YAN | | | | | |
| 80 | SST- | 5754 | GTSNRAP | 6264 | ALWYSTHYV | 6774 |
| | GAVTTSN | | | | | |
| | YAN | | | | | |
| 81 | SST- | 5755 | GTSNRAP | 6265 | ALWYSTHYV | 6775 |
| | GAVTTSN | | | | | |
| | YAN | | | | | |
| 82 | SST- | 5756 | GTSNRAP | 6266 | ALWYSTHYV | 6776 |
| | GAVTTSN | | | | | |
| | YAN | | | | | |
| 17 | RASENIYS | 5757 | AATNLAD | 6267 | QHFWGTPWT | 6777 |
| | NLA | | | | | |
| 157 | IT- | 5758 | EGNTLRP | 6268 | LQSDNMPFT | 6778 |
| | STDIDDD | | | | | |
| | MN | | | | | |
| 27 | MTSIDIDD | 5759 | EGNTLRP | 6269 | LQSDNMPFT | 6779 |
| | DMN | | | | | |
| 158 | RSST- | 5760 | GTSNRAP | 6270 | ALWYSTHYF | 6780 |
| | GAVTTSN | | | | | |
| | YAN | | | | | |
| 159 | KASQSVD | 5761 | AASNLES | 6271 | QQSNEDPLT | 6781 |
| | YD- | | | | | |
| | GDSYMN | | | | | |
| 83 | ASQSVDY | 5762 | AASNLES | 6272 | QQSNEDPLT | 6782 |
| | DGDSYMN | | | | | |
| 160 | KSS- | 5763 | WASTRES | 6273 | QQYYSYPPW | 6783 |
| | QSLLYSTN | | | | | |
| | QKNYLA | | | | | |
| 28 | RSST- | 5764 | GTSNRAP | 6274 | ALWYSTHWV | 6784 |
| | GAVTTSN | | | | | |
| | YAN | | | | | |
| 84 | SST- | 5765 | GTSNRAP | 6275 | ALWYSTHWV | 6785 |
| | GAVTTSN | | | | | |
| | YAN | | | | | |
| 29 | RSST- | 5766 | GTNNRAP | 6276 | ALWYSNHLF | 6786 |
| | GAVTTSN | | | | | |
| | YAN | | | | | |
| 161 | KASQSVD | 5767 | AASNLES | 6277 | QQSNEDPPT | 6787 |
| | YD- | | | | | |
| | GDSYMN | | | | | |
| 30 | RSST- | 5768 | GTNNRAP | 6278 | ALWYSNHWV | 6788 |
| | GAVTTSN | | | | | |
| | YAN | | | | | |
| 162 | RASENIYY | 5769 | NANSLED | 6279 | KQAYDVPYT | 6789 |
| | SLA | | | | | |
| 18 | KSS- | 5770 | FASTRES | 6280 | QQHYSTPLT | 6790 |
| | QSLLNSSN | | | | | |
| | QKNYLA | | | | | |
| 85 | SSQSLLNS | 5771 | FASTRES | 6281 | QQHYSTPLT | 6791 |
| | SNQKNYL | | | | | |
| | A | | | | | |
| 163 | RASQDISN | 5772 | YTSRLHS | 6282 | QQDNTLPRT | 6792 |
| | YLN | | | | | |
| 86 | ASQDISNY | 5773 | YTSRLHS | 6283 | QQDNTLPRT | 6793 |
| | LN | | | | | |
| 164 | RASQDISN | 5774 | YTSRLHS | 6284 | QQGNTLPWT | 6794 |
| | YLN | | | | | |
| 165 | RASENIYS | 5775 | AATNLAD | 6285 | QHFWGTPWT | 6795 |
| | NLA | | | | | |
| 31 | QATQDIV- | 5776 | YATELAE | 6286 | LQFYEFPYT | 6796 |
| | KNLN | | | | | |
| 87 | ATQDIV- | 5777 | YATELAE | 6287 | LQFYEFPYT | 6797 |
| | KNLN | | | | | |
| 32 | SASSSVSY | 5778 | DTSNLAS | 6288 | QQWSSYPLT | 6798 |
| | MY | | | | | |
| 166 | KASQSVD | 5779 | AASNLES | 6289 | QQSNEDPWT | 6799 |
| | YD- | | | | | |
| | GDSYMN | | | | | |
| 88 | ASQSVDY | 5780 | AASNLES | 6290 | QQSNEDPWT | 6800 |
| | DGDSYMN | | | | | |
| 167 | RSST- | 5781 | GTNNRAP | 6291 | ALWYSNHWV | 6801 |
| | GAVTTSN | | | | | |
| | YAN | | | | | |
| 168 | QATQDIV- | 5782 | YATELAE | 6292 | LQFYEFPLT | 6802 |
| | KNLN | | | | | |
| 89 | ATQDIV- | 5783 | YATELAE | 6293 | LQFYEFPLT | 6803 |
| | KNLN | | | | | |
| 169 | TLSSQHST | 5784 | GSHSTGD | 6294 | GVGDTIKEQ | 6804 |
| | YTIEWYQ | | | | | |
| | Q | | | | | |
| 170 | KASQSVD | 5785 | AASNLES | 6295 | QQSNEDPPT | 6805 |
| | YD- | | | | | |
| | GDSYMN | | | | | |
| 171 | RASQDIGI | 5786 | ATSSLDS | 6296 | LQYASSPYT | 6806 |
| | SLN | | | | | |
| 172 | RASENIYS | 5787 | YNAKNLA | 6297 | QHFWGTPYT | 6807 |
| | YL | | | | | |
| 19 | SASSSVSY | 5788 | STSNLAS | 6298 | QQRSSFPYT | 6808 |
| | MH | | | | | |
| 90 | ASSSVSYM | 5789 | STSNLAS | 6299 | QQRSSFPYT | 6809 |
| | H | | | | | |
| 173 | KASQDIN- | 5790 | RANRLVD | 6300 | LQYDEFPLT | 6810 |
| | SYLS | | | | | |
| 91 | ASQDIN- | 5791 | RANRLVD | 6301 | LQYDEFPLT | 6811 |
| | SYLS | | | | | |
| 174 | RASQDIH | 5792 | ETSNLDS | 6302 | LQYASSPLT | 6812 |
| | GYLN | | | | | |
| 92 | ASQDIHGY | 5793 | ETSNLDS | 6303 | LQYASSPLT | 6813 |
| | LN | | | | | |
| 175 | KASQDVG | 5794 | WASTRHT | 6304 | QQYSSYPFT | 6814 |
| | TAVA | | | | | |
| 93 | ASQDVG- | 5795 | WASTRHT | 6305 | QQYSSYPFT | 6815 |
| | TAVA | | | | | |
| 20 | KASQSVS | 5796 | YASNRYT | 6306 | QQDYTSLPT | 6816 |
| | NDVA | | | | | |
| 94 | ASQSVSN- | 5797 | YASNRYT | 6307 | QQDYTSLPT | 6817 |
| | DVA | | | | | |
| 176 | RSST- | 5798 | GTNNRAP | 6308 | ALWYSNHLV | 6818 |
| | GAVTTSN | | | | | |
| | YAN | | | | | |
| 177 | KASQSVD | 5799 | VASNLES | 6309 | QQSHEDPRT | 6819 |
| | YD- | | | | | |
| | GDSYMN | | | | | |
| 178 | SASSSVSY | 5800 | DTSKLAS | 6310 | FQGSGYPLT | 6820 |
| | MH | | | | | |
| 33 | IT- | 5801 | EGNTLRP | 6311 | LQSDNMPLM | 6821 |
| | STDIDDD | | | | | |
| | MN | | | | | |
| 179 | RASENIYS | 5802 | AATNLAD | 6312 | QHFWGTPYT | 6822 |
| | NLA | | | | | |
| 34 | SASSSVSY | 5803 | STSNLAS | 6313 | QQRSTYPTF | 6823 |
| | MH | | | | | |
| 180 | IT- | 5804 | EGNTLRP | 6314 | LQSDNMPLT | 6824 |
| | STDIDDD | | | | | |
| | MN | | | | | |
| 95 | TSTDIDDD | 5805 | EGNTLRP | 6315 | LQSDNMPLT | 6825 |
| | MN | | | | | |
| 181 | RASQDISN | 5806 | YTSRLHS | 6316 | QQGNTLPFT | 6826 |
| | YLN | | | | | |
| 96 | ASQDISNY | 5807 | YTSRLHS | 6317 | QQGNTLPFT | 6827 |
| | LN | | | | | |
| 182 | SAS- | 5808 | YTSSLHS | 6318 | QQYSKLPYT | 6828 |
| | QGISNYLN | | | | | |
| 97 | ASQGISNY | 5809 | YTSSLHS | 6319 | QQYSKLPYT | 6829 |
| | LN | | | | | |
| 183 | RASQSISD | 5810 | YASQSIS | 6320 | QNGHSFPWT | 6830 |
| | YLH | | | | | |
| 98 | ASQSISDY | 5811 | YASQSIS | 6321 | QNGHSFPWT | 6831 |
| | LH | | | | | |
| 35 | QATQDIV- | 5812 | YATELAE | 6322 | LQFYEFPYT | 6832 |
| | KNLN | | | | | |
| 99 | ATQDIV- | 5813 | YATELAE | 6323 | LQFYEFPYT | 6833 |
| | KNLN | | | | | |
| 100 | ATQDIV- | 5814 | YATELAE | 6324 | LQFYEFPYT | 6834 |
| | KNLN | | | | | |
| 36 | RASGNIH | 5815 | NAKTLAD | 6325 | QHFWSTPWT | 6835 |
| | NYLA | | | | | |
| 101 | AS- | 5816 | NAKTLAD | 6326 | QHFWSTPWT | 6836 |
| | GNIHNYLA | | | | | |
| 184 | RSST- | 5817 | GTSYRAP | 6327 | ALWYSTHYV | 6837 |
| | GAVTTSN | | | | | |
| | YAN | | | | | |
| 102 | SST- | 5818 | GTSYRAP | 6328 | ALWYSTHYV | 6838 |
| | GAVTTSN | | | | | |
| | YAN | | | | | |
| 185 | RASQEIS- | 5819 | AASTLDS | 6329 | LQYASYPWT | 6839 |
| | GYLS | | | | | |
| 103 | ASQEIS- | 5820 | AASTLDS | 6330 | LQYASYPWT | 6840 |
| | GYLS | | | | | |
| 186 | KASQSVD | 5821 | AASNLES | 6331 | QQSNEDPLP | 6841 |
| | YD- | | | | | |
| | GDSYMN | | | | | |
| 21 | HASQNIN | 5822 | KASNLHT | 6332 | QQGQSYPLT | 6842 |
| | VWLS | | | | | |
| 187 | SASSSVSY | 5823 | DTSKLAS | 6333 | QQWSSNPLT | 6843 |
| | MH | | | | | |
| 188 | RASGNIH | 5824 | NAKTLAD | 6334 | QHFWSTPWT | 6844 |
| | NYLA | | | | | |
| 189 | RASENIYS | 5825 | NAKTLAE | 6335 | QHHYGTPFT | 6845 |
| | YLA | | | | | |
| 190 | RAS- | 5826 | YTSNLAP | 6336 | QQFTSSLTF | 6846 |
| | SSVNYMY | | | | | |
| 191 | RSST- | 5827 | STNNRAP | 6337 | TLWYSNHWV | 6847 |
| | GAVTTSN | | | | | |
| | YAN | | | | | |
| 192 | KASQDVG | 5828 | WASTRHT | 6338 | QQYSSYPFT | 6848 |
| | TAVA | | | | | |
| 193 | KASQDIN- | 5829 | RANRLVD | 6339 | LQYDEFPPT | 6849 |
| | SYLS | | | | | |
| 194 | RASENIYS | 5830 | AATNLAD | 6340 | QHFWGTPFT | 6850 |
| | NLA | | | | | |
| 195 | RASQSISD | 5831 | YASQSIS | 6341 | QNGHSFPYT | 6851 |
| | YLH | | | | | |
| 104 | ASQSISDY | 5832 | YASQSIS | 6342 | QNGHSFPYT | 6852 |
| | LH | | | | | |
| 37 | RASENIYS | 5833 | AATNLAD | 6343 | QHFWGTPYT | 6853 |
| | NLA | | | | | |
| 196 | RSST- | 5834 | GTNNRAP | 6344 | ALWYSNHWV | 6854 |
| | GAVTTSN | | | | | |
| | YAN | | | | | |
| 197 | IT- | 5835 | EGNTLRP | 6345 | LQSDNLPLT | 6855 |
| | STDIDDD | | | | | |
| | MN | | | | | |
| 198 | SASSSVSY | 5836 | STSNLAS | 6346 | QQRSSYPPT | 6856 |
| | MH | | | | | |
| 199 | SASSSVSY | 5837 | DTSKLAS | 6347 | QQWSSNPLT | 6857 |
| | MH | | | | | |
| 22 | IT- | 5838 | EGNSLRP | 6348 | LQSDNLPLT | 6858 |
| | STDIDDD | | | | | |
| | MN | | | | | |
| 200 | SASSSVSS | 5839 | STSNLAS | 6349 | HQWSSYPPT | 6859 |
| | SYLY | | | | | |
| 201 | TLSSQHST | 5840 | GSHSTGD | 6350 | GVGDTIKEQ | 6860 |
| | YTIEWYQ | | | | | |
| | Q | | | | | |
| 202 | RSSQSIVH | 5841 | KVSNRFS | 6351 | FQGSHVPWT | 6861 |
| | SNGNTYLE | | | | | |
| 203 | KASQDIN- | 5842 | RANRLVD | 6352 | LQYDEFPPT | 6862 |
| | SYLS | | | | | |
| 204 | KSS- | 5843 | LVSKLDS | 6353 | WQGTHFPWT | 6863 |
| | QSLLDSDG | | | | | |
| | KTYLN | | | | | |
| 205 | SASSSVSS | 5844 | STSNLAS | 6354 | HQWSSYPPT | 6864 |
| | SYLY | | | | | |
| 206 | RSSQSIVY | 5845 | KVSNRFS | 6355 | FQGSHVPPT | 6865 |
| | SNGNTYLE | | | | | |
| 207 | RASENI- | 5846 | AATNLAD | 6356 | QHFWGTPWT | 6866 |
| | YNNLA | | | | | |
| 208 | SASSSVSS | 5847 | STSNLAS | 6357 | HQWSSYPPT | 6867 |
| | SYLY | | | | | |
| 209 | SASSSVSY | 5848 | DTSNLAS | 6358 | QQWSTYPPI | 6868 |
| | MY | | | | | |
| 210 | SASSSVSY | 5849 | DTSNLAS | 6359 | QQWSSYPFT | 6869 |
| | MY | | | | | |
| 211 | RAS- | 5850 | ATSNLAS | 6360 | QQWSSNPYT | 6870 |
| | SSVSYMH | | | | | |
| 212 | RASENIYS | 5851 | AATNLAD | 6361 | QHFWGTPWT | 6871 |
| | NLA | | | | | |
| 213 | KASQDVS | 5852 | WASTRHT | 6362 | QQHYSTPWT | 6872 |
| | TAVA | | | | | |
| 214 | KSS- | 5853 | LVSKLDS | 6363 | WQGTHFPWT | 6873 |
| | QSLLDSDG | | | | | |
| | KTYLN | | | | | |
| 215 | RSSQSIVH | 5854 | KVSNRFS | 6364 | FQGSHVPPT | 6874 |
| | SNGNTYLE | | | | | |
| 216 | IT- | 5855 | EGNTLRP | 6365 | LQSDNMPLT | 6875 |
| | STDIDDD | | | | | |
| | MN | | | | | |
| 217 | KASQDINK | 5856 | YTSTLQP | 6366 | LQYDNLYMY | 6876 |
| | YIA | | | | | |
| 218 | HASQNIN | 5857 | KASNLHT | 6367 | QQGQSYPYT | 6877 |
| | VWLS | | | | | |
| 219 | SASSSVSY | 5858 | LTSNLAS | 6368 | QQWSSNPPT | 6878 |
| | MY | | | | | |
| 220 | KSS- | 5859 | LVSKLDS | 6369 | WQGTHFPWT | 6879 |
| | QSLLDSDG | | | | | |
| | KTYLN | | | | | |
| 221 | SASLSVSD | 5860 | DTSNLAS | 6370 | QQWSSYPFT | 6880 |
| | MY | | | | | |
| 222 | SASSSVSS | 5861 | STSNLAS | 6371 | HQWSSYPPT | 6881 |
| | SYLY | | | | | |
| 223 | RAS- | 5862 | YTSNLAP | 6372 | QQFTSSPST | 6882 |
| | SSVNYMY | | | | | |
| 105 | ASSSVNY | 5863 | YTSNLAP | 6373 | QQFTSSPST | 6883 |
| | MY | | | | | |
| 224 | IT- | 5864 | EGNTLRP | 6374 | LQSDNLPLT | 6884 |
| | NTDIDDD | | | | | |
| | MN | | | | | |
| 106 | TNTDIDDD | 5865 | EGNTLRP | 6375 | LQSDNLPLT | 6885 |
| | MN | | | | | |
| 225 | KASQSVD | 5866 | AASNLES | 6376 | QQSNEDPWT | 6886 |
| | YD- | | | | | |
| | GDSYMN | | | | | |
| 226 | RASQSISN | 5867 | YASQSIS | 6377 | QQSNSWPFT | 6887 |
| | NLH | | | | | |
| 227 | SASSSVSS | 5868 | STSNLAS | 6378 | HQWSSYPPT | 6888 |
| | SYLY | | | | | |
| 228 | IT- | 5869 | EGNTLRP | 6379 | LQSDNMPLT | 6889 |
| | STDIDDD | | | | | |
| | MN | | | | | |
| 229 | KSS- | 5870 | LVSKLDS | 6380 | WQGTHFPWT | 6890 |
| | QSLLDSDG | | | | | |
| | KTYLH | | | | | |
| 230 | KASQDINK | 5871 | YTSTLQP | 6381 | LQYDNLRTF | 6891 |
| | YIA | | | | | |
| 231 | RSST- | 5872 | GTNNRAP | 6382 | VLWYSNHLV | 6892 |
| | GAVTTSN | | | | | |
| | YAN | | | | | |
| 232 | KASEN- | 5873 | GASNRYT | 6383 | GQSYSYPPT | 6893 |
| | VGTYVS | | | | | |
| 233 | RASET- | 5874 | RASNLES | 6384 | QQSNEDPRT | 6894 |
| | VDSYGYSF | | | | | |
| | MH | | | | | |
| 234 | KSS- | 5875 | WASTRES | 6385 | QQYYSYRTF | 6895 |
| | QSLLYSTN | | | | | |
| | QKNYLA | | | | | |
| 235 | KSS- | 5876 | LVSKLDS | 6386 | WQGTHFPFT | 6896 |
| | QSLLDSDG | | | | | |
| | KTYLN | | | | | |
| 236 | KASQSVD | 5877 | AASNLES | 6387 | QQSNEDPFT | 6897 |
| | YD- | | | | | |
| | GDSYMN | | | | | |
| 237 | TLSSQHST | 5878 | GSHSTGD | 6388 | GVGDTIKEQ | 6898 |
| | YTIEWYQ | | | | | |
| | Q | | | | | |
| 107 | LSSQHSTY | 5879 | GSHSTGD | 6389 | GVGDTIKEQFVYV | 6899 |
| | TIEWYQQ | | | | | |
| 238 | SASSSVSY | 5880 | DTSKLAS | 6390 | QQWSSNPLT | 6900 |
| | MH | | | | | |
| 108 | ASSSVSYM | 5881 | DTSKLAS | 6391 | QQWSSNPLT | 6901 |
| | H | | | | | |
| 239 | QATQDIV- | 5882 | YATELAE | 6392 | LQFYEFPLT | 6902 |
| | KNLN | | | | | |
| 240 | RAS- | 5883 | AASNQGS | 6393 | QQSKEVPPT | 6903 |
| | ESVDNY- | | | | | |
| | GISFMN | | | | | |
| 241 | RASQSISD | 5884 | YASQSIS | 6394 | QNGHSFPLT | 6904 |
| | YLH | | | | | |
| 242 | RSSQSIVH | 5885 | KVSNRFS | 6395 | FQGSHVPLT | 6905 |
| | SNGDTYLE | | | | | |
| 243 | SASSSVSY | 5886 | DTSKLAS | 6396 | QQWSSNPLT | 6906 |
| | MH | | | | | |
| 244 | TASESLYS- | 5887 | GASNRYI | 6397 | AQFYSYPYT | 6907 |
| | SKHKVHYL | | | | | |
| | A | | | | | |
| 245 | TLSSQHST | 5888 | GSHSTGD | 6398 | GVGDTIKEQ | 6908 |
| | YTIEWYQ | | | | | |
| | Q | | | | | |
| 246 | RASQSVST | 5889 | YASNLES | 6399 | QHSWEIPLT | 6909 |
| | SSYSYMH | | | | | |
| 247 | SASSSVSY | 5890 | DTSKLAS | 6400 | QQWSSNPLT | 6910 |
| | MH | | | | | |
| 248 | KASDHIN | 5891 | GATSLET | 6401 | QQYWSTPLT | 6911 |
| | NWLA | | | | | |
| 249 | RASENIYS | 5892 | NAKTLAE | 6402 | QHHYGTPYT | 6912 |
| | YLA | | | | | |
| 250 | RASENIYS | 5893 | NAKTLAE | 6403 | QHHYGTPPT | 6913 |
| | YLA | | | | | |
| 251 | SASSSVSY | 5894 | DTSKLAS | 6404 | QQWSSNPPT | 6914 |
| | MH | | | | | |
| 252 | RAS- | 5895 | AASNQGS | 6405 | QQSKEVPPT | 6915 |
| | ESVDNY- | | | | | |
| | GISFMN | | | | | |
| 253 | TASESLYS- | 5896 | GASNRYI | 6406 | AQFYSYPYT | 6916 |
| | SKHKVHYL | | | | | |
| | A | | | | | |
| 254 | RSST- | 5897 | GTSNRAP | 6407 | ALWYSTHYV | 6917 |
| | GAVTTSN | | | | | |
| | YAN | | | | | |
| 255 | SASSSI- | 5898 | DTSKLAS | 6408 | HQRSSYPTF | 6918 |
| | SYMH | | | | | |
| | HCDR1 | | HCDR2 | | HCDR3 | |
| Binder | | SEQ ID | | SEQ ID | | SEQ ID |
| Name | Sequence | NO: | Sequence | NO: | Sequence | NO: |
| 265 | SYALS | 9968 | IINPSGGTNYAQKFQG | 10230 | DLGDPGMDV | 10492 |
| 266 | NYAIS | 9969 | IIDPSGGSTTYAQKFQG | 10231 | DLGDMGMDV | 10493 |
| 267 | NYAFS | 9970 | IINPSGGSTSYAQKFQG | 10232 | DVGDRGMDV | 10494 |
| 263 | SYALS | 9971 | IINPSGGTNYAQKFQG | 10233 | DLGDPGMDV | 10495 |
| 268 | GYYMH | 9972 | WIDPNGGGTQYAQKFQG | 10234 | DIVHDGTEYFQH | 10496 |
| 269 | SYYMH | 9973 | IINPSGGSTSYAQKFQG | 10235 | DIVHDGTEYFQH | 10497 |
| 270 | SYAIS | 9974 | IINPSGGSTNYAQKFQG | 10236 | EGRDHDAFDI | 10498 |
| 271 | DYGIS | 9975 | IINPSGGSTSYAQKFQG | 10237 | EGRSHDAFDI | 10499 |
| 272 | GYYMH | 9976 | WMNPHSGDTGYAQKFQG | 10238 | WVGTTEYYYYYYMDV | 10500 |
| 273 | DYYLH | 9977 | IIDPSGGSTSIAQKFQG | 10239 | TAYYDFWSGYSMDV | 10501 |
| 274 | SHYMH | 9978 | IIDPSGGSTSYAQEFQG | 10240 | DMDNWNTGYYYYMD | 10502 |
| | | | | | V | |
| 275 | SYAIN | 9979 | WVNPNSGDTAYAQKFQG | 10241 | DQRGGDAWDV | 10503 |
| 276 | NYAIS | 9980 | IITPSGGSTTYAHKFQG | 10242 | DTAGHFDI | 10504 |
| 277 | NDVIN | 9981 | WMNPNSGNTGYAQKFQG | 10243 | DNPDLDGMDV | 10505 |
| 278 | SYAIN | 9982 | WISAYNGNTNYAQKFQG | 10244 | DLVGHFDY | 10506 |
| 279 | SYAIS | 9983 | WINPNSGGTNYAQKFQG | 10245 | DGYSGSYSD | 10507 |
| 264 | SYAIS | 9984 | WINPNSGGTNYAQKFQG | 10246 | DGYSGSYSD | 10508 |
| 257 | SYAIS | 9985 | WINPNSGGTNYAQKFQG | 10247 | DGYSGSYSD | 10509 |
| 280 | SHAIS | 9986 | IINPSGGSTSYAQKFQG | 10248 | DQGSSGTFDY | 10510 |
| 281 | SYAIS | 9987 | WINPNSGGTNYAQKFQG | 10249 | DSTDVIDY | 10511 |
| 282 | SYDIN | 9988 | WINPNSGDTKYAQNFQG | 10250 | DGGTVTPTEEYYYYG- | 10512 |
| | | | | | MDV | |
| 283 | SYAIS | 9989 | WISVYNGNTNYAQNLQG | 10251 | LDDLDY | 10513 |
| 284 | SYYIH | 9990 | WINPNNGGTHYAQKFQG | 10252 | DMVRDSAEYFQH | 10514 |
| 285 | TSYIH | 9991 | MINPSGGTTTYAQKFQG | 10253 | DSSGYPIDY | 10515 |
| 286 | SYDIN | 9992 | GIIPLSGAPNYAHKFQG | 10254 | GALYNWNDGWFDP | 10516 |
| 258 | SYDIN | 9993 | GIIPLSGAPNYAHKFQG | 10255 | GALYNWNDGWFDP | 10517 |
| 287 | SWYMS | 9994 | GIWYEGSNKYYADSVKG | 10256 | LGTASLPYFDY | 10518 |
| 288 | GYYMH | 9995 | WINPNRGDTKYAQKFQG | 10257 | ESGDGFDP | 10519 |
| 289 | NYYIH | 9996 | WMNPNSGNTGYAQKFQG | 10258 | DWPNWFDP | 10520 |
| 290 | DNYIH | 9997 | WIRSDNGETSYAQKFQG | 10259 | EVQLVGFDY | 10521 |
| 291 | DHHVH | 9998 | GIIPIFGTANYAQKFQG | 10260 | GSSWYLHFQH | 10522 |
| 260 | DHHVH | 9999 | GIIPIFGTANYAQKFQG | 10261 | GSSWYLHFQH | 10523 |
| 292 | SYAIY | 10000 | GIIPIFGTTNYAQKFQG | 10262 | GVDRYNWNDAFDY | 10524 |
| 293 | DYYMH | 10001 | WIHSNSGGTHSAQKFQG | 10263 | ESSGYDSSLDY | 10525 |
| 294 | SYGIS | 10002 | WINPNSGDTDYAQKFQG | 10264 | DPRLDSSDPGY | 10526 |
| 295 | NYGIN | 10003 | WISAYNGNTNYAQKFQG | 10265 | GGMDV | 10527 |
| 296 | RYGIA | 10004 | ISYPSDGSTSSAQKLQG | 10266 | DRLGDLDY | 10528 |
| 261 | RYGIA | 10005 | ISYPSDGSTSSAQKLQG | 10267 | DRLGDLDY | 10529 |
| 297 | SYAIS | 10006 | WMNPNSGNTGYAQKFQG | 10268 | DSIVGGYPFDY | 10530 |
| 298 | SYDIN | 10007 | TITPIFGTTDYAQKFQG | 10269 | EGYSSSWHDDAFDI | 10531 |
| 299 | NYAIS | 10008 | IIDPSGGSTSYAQKFQG | 10270 | DLGDYGLDS | 10532 |
| 300 | GYYMH | 10009 | WMNPNSGDTGYAQRFQG | 10271 | GGSDSSGYYYEGYFQH | 10533 |
| 301 | SYAIS | 10010 | YMSPNSGNTGYAQKFQG | 10272 | DKGGYYDSSGYYWY | 10534 |
| 302 | SYEMH | 10011 | AISSNGGSTYYADSVKG | 10273 | VGDGDGYNPDFDY | 10535 |
| 303 | SYGIS | 10012 | WIDPTSGATDTAHKFQG | 10274 | DPIVATEVDY | 10536 |
| 304 | SYAIS | 10013 | WMSPNSGNTGYAQKFQG | 10275 | DSGAFDI | 10537 |
| 305 | NYAIS | 10014 | WMNPNSGNTGYAQKFQG | 10276 | EGLLDAFDI | 10538 |
| 306 | RYGIT | 10015 | WMNPYDGNTGYAQKFQG | 10277 | GGRHHDAFDI | 10539 |
| 307 | SYAIS | 10016 | IINPSGDGTNYAQKFQG | 10278 | DISNDAFDI | 10540 |
| 308 | GHYMH | 10017 | WISAYNGDTNYAQKFQG | 10279 | GSSWDDAFDI | 10541 |
| 309 | NHYTS | 10018 | AIGAGGGTYYADSVKG | 10280 | EGWNDDVFDI | 10542 |
| 310 | SYAIS | 10019 | IINPSAGTTYYAERFQG | 10281 | DGNFGAFDI | 10543 |
| 311 | TYAIT | 10020 | EIIPIFGTANYAQKFQG | 10282 | DKSGWNYGSGSYN- | 10544 |
| | | | | | DAFDI | |
| 312 | GYYMH | 10021 | WMNPNSGKTEYAQKFQG | 10283 | DGGLDFDY | 10545 |
| 313 | TYYIH | 10022 | WMNPNTGDTGSAQKFQG | 10284 | DPAVTPDAFDI | 10546 |
| 314 | SYAIS | 10023 | IIDPSGGGTSYAQKLQG | 10285 | SLYYYGMDV | 10547 |
| 315 | SSAIS | 10024 | GIIPIFGTANYAQKFQG | 10286 | EDDILPPRAFDI | 10548 |
| 316 | DYAMH | 10025 | GISGGGGVTYYADSVKG | 10287 | VYSSGWLDAFDI | 10549 |
| 317 | SYAIS | 10026 | WISGYNGNTNYAQKFQG | 10288 | SDVSPDAFDI | 10550 |
| 318 | IYAIT | 10027 | WVNPNSGNTGYSQKFQG | 10289 | PTSSSDDAFDI | 10551 |
| 319 | SYAIS | 10028 | WINPNSGGTNYAQKFQG | 10290 | ASRGDDAFDI | 10552 |
| 320 | SDDIN | 10029 | IINPSGGSTSYAQKFQG | 10291 | ERYEGGY- | 10553 |
| | | | | | SSGPGNYYYGMDV | |
| 321 | NYAIS | 10030 | WMNPNSGNTGYAQKFQG | 10292 | DDDYGDYPV | 10554 |
| 322 | DHAIN | 10031 | WMNPKIGNTGYAQKFQG | 10293 | DSSGYDAFDI | 10555 |
| 323 | SYDIN | 10032 | RINPGTGGTDYAHKFQG | 10294 | ETPSDYYDSSGYYYN- | 10556 |
| | | | | | DAFDI | |
| 324 | SYAIS | 10033 | IIIPSGGTNYAQTFQG | 10295 | DLGTTFDI | 10557 |
| 325 | AYYLH | 10034 | WINPDNDNAYYAQKFQG | 10296 | DIAVAALAYGMDV | 10558 |
| 326 | SYAMS | 10035 | VISYDGSDQYYADSVKG | 10297 | QSLYYYYGMDV | 10559 |
| 327 | DYYVH | 10036 | WISTFTGNTDYAQNFQG | 10298 | DAPLAAAGTDYYYG- | 10560 |
| | | | | | MDV | |
| 262 | DYYVH | 10037 | WISTFTGNTDYAQNFQG | 10299 | DAPLAAAGTDYYYG- | 10561 |
| | | | | | MDV | |
| 328 | SYAMS | 10038 | FISDDGITKYYADSVKG | 10300 | DDSSGYGGMDV | 10562 |
| 329 | SYAMH | 10039 | VISYDGGDKYYADSVKG | 10301 | GSLVLGYYYMDV | 10563 |
| 330 | NYYIH | 10040 | WINPNTGGTDYAQKFQG | 10302 | GGGGSYYDAFDV | 10564 |
| 331 | SYAIS | 10041 | RINPNSGNTGYAQKFQG | 10303 | DIGEGYSMDV | 10565 |
| 332 | NHYTS | 10042 | VISYDGSNKYYADSVKG | 10304 | EEKYSSSWYVGVDAFDI | 10566 |
| 333 | SSAMH | 10043 | SISGSGDNAYYADSVKG | 10305 | DQEDYYYDSSGYGMDV | 10567 |
| 334 | SHAIS | 10044 | GIIPIFGTANYAQKFQG | 10306 | GDWGIVVVPAAIGAFDI | 10568 |
| 335 | AYYMH | 10045 | RISPVFGSTTYAQRFQG | 10307 | DLGYYDSSGYRYDAFDI | 10569 |
| 336 | SYDIN | 10046 | GISPMFGTANYAQKFQG | 10308 | DGWYYGMDV | 10570 |
| 337 | SYGIS | 10047 | WINPNSGGTKYAQKFQG | 10309 | GEAGNLDWYFDL | 10571 |
| 338 | NYGIS | 10048 | WINPNNGDTKYAQKFQG | 10310 | EDVWYFDL | 10572 |
| 339 | TYGIS | 10049 | WISTYDGKTNYAQKLQG | 10311 | HLGGDWYFDL | 10573 |
| 340 | GYYMH | 10050 | WINPNTGATYYAQKFQG | 10312 | QHGDYDWYFDL | 10574 |
| 341 | TYYVH | 10051 | WINPNSGNTGYAQKFQG | 10313 | DSGRH | 10575 |
| 342 | SYGIS | 10052 | RIIPMLGIANYAQKFQG | 10314 | EEVAGANWFDP | 10576 |
| 343 | SYAMN | 10053 | IINPSGGSTSYARKFQG | 10315 | EGDYGSGEFDY | 10577 |
| 344 | SSYMH | 10054 | WMNPRSGNTGYAQKFQG | 10316 | ERDDYGDYGWLDY | 10578 |
| 345 | GYYMH | 10055 | IINPSGGSTSYAQKFQG | 10317 | DLYDSSGY- | 10579 |
| | | | | | WHYYYYMDV | |
| 346 | SYAFS | 10056 | WINPNSGGTNYAQKFQG | 10318 | FSGYDYVDY | 10580 |
| 347 | SYAIS | 10057 | IINPNGGNTSYAQKFQG | 10319 | DVGEDFDL | 10581 |
| 348 | SYYIH | 10058 | VINPADGDTTYAQMFQG | 10320 | DFDWLFAMDV | 10582 |
| 349 | NYALN | 10059 | RINPNGGTTYYAKNFQG | 10321 | HGDHGFYV | 10583 |
| 350 | SYAIS | 10060 | MINPNVGSATYAQRFQG | 10322 | EDSGTSWFDP | 10584 |
| 351 | SYYMH | 10061 | IINPSDGSTSYAQRFQG | 10323 | DDRGSNYYYGMDV | 10585 |
| 352 | AYYVH | 10062 | WMNPNSGTTGYAQKFQG | 10324 | DSSDYYGDYRADAFDI | 10586 |
| 353 | SYDIN | 10063 | VISPSGDATLYAQSFQG | 10325 | GLDH | 10587 |
| 354 | DYGMH | 10064 | AIGGIGDSTYYADSVKG | 10326 | MNYGDSNYYYYYG- | 10588 |
| | | | | | MDV | |
| 355 | SYDIS | 10065 | MISPSDGSTTYAPKFQG | 10327 | GAVGFDY | 10589 |
| 356 | SYGIS | 10066 | WINTYSGYTDYAHKFQG | 10328 | DDFLSFGY | 10590 |
| 357 | DYYIH | 10067 | GIIPYFGTANYAQKFQG | 10329 | SISGSYVLDAFDI | 10591 |
| 358 | SYGIS | 10068 | GIIPIFGTANYAQKFQG | 10330 | DWGYGDYADDAFDI | 10592 |
| 359 | NNDIN | 10069 | WINPIYGSANYAQNFQG | 10331 | DWRGFDY | 10593 |
| 360 | EYAIH | 10070 | RMNPHNGDTGYAQKFQG | 10332 | EGDYLGYPIDC | 10594 |
| 361 | DYSMS | 10071 | AIWQDGNVKFYADSVKG | 10333 | DGNSGYVF | 10595 |
| 362 | TYYMH | 10072 | WINPNTGDTAYAQKIQG | 10334 | TAEAVAGLPAFDY | 10596 |
| 363 | NYAID | 10073 | GIIPLFGTTTYAQKFQG | 10335 | VTLYGDYDY | 10597 |
| 364 | THWMH | 10074 | MINPSDGVTYYAQTFQG | 10336 | EYYGEGFDY | 10598 |
| 259 | THWMH | 10075 | MINPSDGVTYYAQTFQG | 10337 | EYYGEGFDY | 10599 |
| 365 | SYAIS | 10076 | IINPSGGSTSNAQKFQG | 10338 | DLGDTAMDG | 10600 |
| 366 | SYYLH | 10077 | IITPSGGSTTYAHKFQG | 10339 | DGGLASFDY | 10601 |
| 367 | SYAIS | 10078 | WMNPNSGNTGYAQKFQG | 10340 | GGGWAMTDAFDI | 10602 |
| 368 | DYGMS | 10079 | LIYSGGDTYYADSVKG | 10341 | KEYYYDSSGYLRLFDY | 10603 |
| 369 | DYYMH | 10080 | GINPIFGTSNYAQKFQG | 10342 | DISGYDYYYYGMDV | 10604 |
| 370 | NYAFS | 10081 | MIDPSDGTIAYAQKFQG | 10343 | SDYDFWSGLGGYFDY | 10605 |
| 371 | SYAIS | 10082 | TIDPNSGGTMFAQKFQG | 10344 | DSAEWELGGSFDY | 10606 |
| 372 | NHYTS | 10083 | SIGVNGDTYYLDSVKG | 10345 | EGLVFSGRGHWYFDL | 10607 |
| 373 | NYAIS | 10084 | RINPNGGNTSNAQKFQG | 10346 | DYEDADFDG | 10608 |
| 374 | DHHVH | 10085 | WMNPDSGNTGYAQRFQG | 10347 | DSTSGVDY | 10609 |
| 375 | SYAMS | 10086 | VISYDGHDQFYADSVKG | 10348 | GEQQLEGFYYYYGMDV | 10610 |
| 376 | SYWMH | 10087 | VISYDGSKEYYADSVKG | 10349 | DYGDYGTYDY | 10611 |
| 377 | SYWMH | 10088 | GISGGGDDTYYADSVKG | 10350 | EPLAYCGGDCPGGFDY | 10612 |
| 378 | DHYMD | 10089 | AIGTGGDTYYADSVKG | 10351 | HEDTAIFLDY | 10613 |
| 379 | SYYMH | 10090 | MISPSDGSTTYAPKFQG | 10352 | DGYDAWSYGMDV | 10614 |
| 380 | GYYMH | 10091 | WMNPNSGNTGYAQKFQG | 10353 | DGVTGTDY | 10615 |
| 381 | SYVLH | 10092 | AISGAGDSTYYADSVKG | 10354 | EPTTVTDDWYFDL | 10616 |
| 382 | SHWMH | 10093 | AISGNGDNSYYADSVKG | 10355 | DRAPEYFDL | 10617 |
| 383 | SYAIS | 10094 | WINPNSGGTNYAQKFQG | 10356 | DDYGDYGGGMDV | 10618 |
| 384 | DYYMH | 10095 | WMNPNSGHTGYAEKFQG | 10357 | DTSPRYGDGFFDY | 10619 |
| 385 | SYWMH | 10096 | VTSYDGSNKYYADSVKG | 10358 | ESGFSAEYFQH | 10620 |
| 386 | SYAIS | 10097 | IINPSGGSTSYAQKFQG | 10359 | ATGLYCSGSCFDY | 10621 |
| | LCDR1 | | LCDR2 | | LCDR3 | |
| Binder | | SEQ ID | | SEQ ID | | SEQ ID |
| Name | Sequence | NO: | Sequence | NO: | Sequence | NO: |
| 265 | RASQDISN | 12194 | DASNLET | 12454 | QQSYSTPLT | 12714 |
| | YLN | | | | | |
| 266 | RASQSIS- | 12195 | AASSLQS | 12455 | QQSYSTPLT | 12715 |
| | SYLN | | | | | |
| 267 | QASQDIS | 12196 | KASSLET | 12456 | QQSFSSPLT | 12716 |
| | NYLN | | | | | |
| 263 | RASQDISN | 12197 | DASNLET | 12457 | QQSYSTPLT | 12717 |
| | YLN | | | | | |
| 268 | RASQNVN | 12198 | EASSLQS | 12458 | QQANSFPFT | 12718 |
| | TWLA | | | | | |
| 269 | RASQSISD | 12199 | AASSLQS | 12459 | AQHNHYPYT | 12719 |
| | WLA | | | | | |
| 270 | KSS- | 12200 | WASTRES | 12460 | QQYYTTPFT | 12720 |
| | QSVLSSSY | | | | | |
| | NKNYLA | | | | | |
| 271 | KSS- | 12201 | WASTRAS | 12461 | QQYYSTPFT | 12721 |
| | QSVLSSSY | | | | | |
| | NKNYLA | | | | | |
| 272 | RAS- | 12202 | DASHLEA | 12462 | QQANSFPIT | 12722 |
| | QAIRDDLG | | | | | |
| 273 | RASQGVG | 12203 | AASTLQT | 12463 | QQASSFPLT | 12723 |
| | NDLA | | | | | |
| 274 | RASQI- | 12204 | AASSLQS | 12464 | QQSYTFPVT | 12724 |
| | IGTNLA | | | | | |
| 275 | RASQSIST- | 12205 | DASSLES | 12465 | QQSYSTPFT | 12725 |
| | WLA | | | | | |
| 276 | KSS- | 12206 | WASTRES | 12466 | QQYYGSPLT | 12726 |
| | QSVLSSS- | | | | | |
| | NNKNYLA | | | | | |
| 277 | KSS- | 12207 | WASTRES | 12467 | QQYYSSPPT | 12727 |
| | QSVLSSSY | | | | | |
| | NKNYLA | | | | | |
| 278 | KSS- | 12208 | WASTRES | 12468 | QQYYSSPPT | 12728 |
| | QSVLSSSY | | | | | |
| | NKNYLA | | | | | |
| 279 | KSS- | 12209 | WASTRES | 12469 | QQYYSTPWT | 12729 |
| | QSVLSSSY | | | | | |
| | NKNYLA | | | | | |
| 264 | KSS- | 12210 | WASTRES | 12470 | QQYYSTPWT | 12730 |
| | QSVLSSSY | | | | | |
| | NKNYLA | | | | | |
| 257 | KSS- | 12211 | WASTRES | 12471 | QQYYSTPWT | 12731 |
| | QSVLSSSY | | | | | |
| | NKNYLA | | | | | |
| 280 | KSS- | 12212 | WASTRAS | 12472 | QQYYGSPPT | 12732 |
| | QSVLSSSY | | | | | |
| | NKNYLA | | | | | |
| 281 | QASQDIR | 12213 | DASTLQS | 12473 | QQAYSFPWT | 12733 |
| | NYLN | | | | | |
| 282 | QASQDIS | 12214 | NASNLET | 12474 | QQLNSYPFT | 12734 |
| | NYLN | | | | | |
| 283 | QASQSIST | 12215 | AASTLRS | 12475 | LQHYTYPLT | 12735 |
| | WLA | | | | | |
| 284 | RASEDI- | 12216 | AASTLQS | 12476 | QQSHTIPWT | 12736 |
| | STYLA | | | | | |
| 285 | RASH- | 12217 | AASTLQS | 12477 | QQSYSSPYT | 12737 |
| | HISDFLN | | | | | |
| 286 | RASQDIG | 12218 | DASSLQS | 12478 | QQANSFPLT | 12738 |
| | DYLA | | | | | |
| 258 | RASQDIG | 12219 | DASSLQS | 12479 | QQANSFPLT | 12739 |
| | DYLA | | | | | |
| 287 | RASQDIRS | 12220 | AASSLQS | 12480 | QQSYTAPPT | 12740 |
| | YLA | | | | | |
| 288 | RASQDIS- | 12221 | AASTLQS | 12481 | LQHNTYPLT | 12741 |
| | NNLN | | | | | |
| 289 | RASQDIS- | 12222 | DASSLQS | 12482 | QQAISFPLT | 12742 |
| | NWLA | | | | | |
| 290 | RASQGIA | 12223 | AASSLQS | 12483 | QQADSFPLT | 12743 |
| | NYLA | | | | | |
| 291 | RASQGIAS | 12224 | AASTLQP | 12484 | QQFDSYPIT | 12744 |
| | YLA | | | | | |
| 260 | RASQGIAS | 12225 | AASTLQP | 12485 | QQFDSYPIT | 12745 |
| | YLA | | | | | |
| 292 | RASQGISN | 12226 | AASRLQS | 12486 | QQSSIIPFT | 12746 |
| | YLA | | | | | |
| 293 | RASQGISN | 12227 | AASTLQS | 12487 | QQAYSFPYT | 12747 |
| | YLA | | | | | |
| 294 | RASQSIGR | 12228 | DASNLET | 12488 | QQSYSTPRT | 12748 |
| | WLA | | | | | |
| 295 | RASQSINS | 12229 | DTSSLQS | 12489 | QQTYSTPYT | 12749 |
| | WLA | | | | | |
| 296 | RASQSISS | 12230 | AASTLQS | 12490 | QQGYSTPYI | 12750 |
| | WLA | | | | | |
| 261 | RASQSISS | 12231 | AASTLQS | 12491 | QQGYSTPYI | 12751 |
| | WLA | | | | | |
| 297 | RASQSIS- | 12232 | AASSLQS | 12492 | QQTDSIPIT | 12752 |
| | SYLN | | | | | |
| 298 | RASQSIS- | 12233 | AASTLQS | 12493 | QQSYSIPYT | 12753 |
| | SYLN | | | | | |
| 299 | RASQTIRS | 12234 | KASSLES | 12494 | QQTYTIPIT | 12754 |
| | YLN | | | | | |
| 300 | RASQTISN | 12235 | AASTLQS | 12495 | QQANSFPPT | 12755 |
| | WLA | | | | | |
| 301 | RASQYIGS | 12236 | DASNLET | 12496 | QQVDSYPLT | 12756 |
| | YLN | | | | | |
| 302 | RSSQSLLH | 12237 | LGSNRAS | 12497 | MQGTHWPPT | 12757 |
| | SNGYNYL | | | | | |
| | D | | | | | |
| 303 | RSSQSLLH | 12238 | FGSNRAS | 12498 | MQALQAPVS | 12758 |
| | SNGYNYL | | | | | |
| | D | | | | | |
| 304 | KSS- | 12239 | WASSRQS | 12499 | QQYYSTPLT | 12759 |
| | QSVLSSSY | | | | | |
| | NKNYLA | | | | | |
| 305 | KSS- | 12240 | WASVRES | 12500 | QQYYSTPIT | 12760 |
| | QSVSSSSY | | | | | |
| | NKNYLA | | | | | |
| 306 | KSTQNVLS | 12241 | WASTRES | 12501 | QQYYSTPFT | 12761 |
| | SSNNN- | | | | | |
| | SYLA | | | | | |
| 307 | QASQDIG | 12242 | AASSLQS | 12502 | QQTYNTPLT | 12762 |
| | NYLN | | | | | |
| 308 | QASQDIS | 12243 | EASTLQS | 12503 | QQSYSTPFT | 12763 |
| | NYLN | | | | | |
| 309 | QASQDIST | 12244 | RASTLES | 12504 | QQSYSIPLT | 12764 |
| | WLA | | | | | |
| 310 | RASQNIN- | 12245 | AASRLQS | 12505 | QQSYSAPVT | 12765 |
| | NYLN | | | | | |
| 311 | RASQNINT | 12246 | AASSLQS | 12506 | QQAYSFPFT | 12766 |
| | WLA | | | | | |
| 312 | RASQRIGN | 12247 | AASSLQS | 12507 | QQSYSTPLT | 12767 |
| | YLN | | | | | |
| 313 | RASQSIST | 12248 | AASTLQS | 12508 | QQSYRTVT | 12768 |
| | YLN | | | | | |
| 314 | RASQSVG | 12249 | GASTRAT | 12509 | QQYDSSSQT | 12769 |
| | SYLA | | | | | |
| 315 | RASRSVST | 12250 | GASTRAT | 12510 | QQYDGSPYT | 12770 |
| | YLA | | | | | |
| 316 | RSSQSLLH | 12251 | DASNLET | 12511 | MQALQTPPA | 12771 |
| | SNGYNYL | | | | | |
| | D | | | | | |
| 317 | KSS- | 12252 | WASTRES | 12512 | QQYYSAPPT | 12772 |
| | QSVLSSSY | | | | | |
| | NKNFLA | | | | | |
| 318 | KSS- | 12253 | WASTRES | 12513 | QQYYSDPIT | 12773 |
| | QSVLSSSY | | | | | |
| | NKNFLA | | | | | |
| 319 | KSS- | 12254 | WASARES | 12514 | QQYYSIPIA | 12774 |
| | QSVLSSSY | | | | | |
| | NKNYLA | | | | | |
| 320 | KSS- | 12255 | WASTRDS | 12515 | QQYYSIPYT | 12775 |
| | QSVLSSSY | | | | | |
| | NKNYLA | | | | | |
| 321 | KSS- | 12256 | WASTRAS | 12516 | QQYYTTPPT | 12776 |
| | QSVLSTSY | | | | | |
| | NKNYLA | | | | | |
| 322 | KSS- | 12257 | WASTRQS | 12517 | QQYYSTPYT | 12777 |
| | QSVLSTSY | | | | | |
| | NRNFLA | | | | | |
| 323 | KSS- | 12258 | WASTRES | 12518 | QQYYSTPLT | 12778 |
| | QSVLYSSN | | | | | |
| | NKNYLA | | | | | |
| 324 | QASQDIS | 12259 | AASSLQS | 12519 | QQSYSTPT | 12779 |
| | NYLN | | | | | |
| 325 | QASQDIS | 12260 | GASTLQS | 12520 | QEADSFPLT | 12780 |
| | NYLN | | | | | |
| 326 | RASQGIRN | 12261 | DASSLHS | 12521 | QQAYSFPWT | 12781 |
| | DLG | | | | | |
| 327 | RASQGISN | 12262 | KASSLES | 12522 | QQSYNTPFT | 12782 |
| | YLA | | | | | |
| 262 | RASQGISN | 12263 | KASSLES | 12523 | QQSYNTPFT | 12783 |
| | YLA | | | | | |
| 328 | RASQSINR | 12264 | SASNLQS | 12524 | QQSYNTPLT | 12784 |
| | WLA | | | | | |
| 329 | RASQSINT | 12265 | AASSLQS | 12525 | QQANSFPFT | 12785 |
| | WLA | | | | | |
| 330 | RASQSIRT- | 12266 | DASSLET | 12526 | QQLNSYPLT | 12786 |
| | WLA | | | | | |
| 331 | RASQSIRT | 12267 | AASTLQS | 12527 | QQSYSAPLT | 12787 |
| | YLN | | | | | |
| 332 | RASQSIST | 12268 | AASSLHS | 12528 | QQSYSTPLT | 12788 |
| | YLN | | | | | |
| 333 | RASQSIT- | 12269 | AASTLQS | 12529 | QQSYSTPLT | 12789 |
| | TYLN | | | | | |
| 334 | RSSQSLLH | 12270 | AASSLQS | 12530 | MQARQTPLT | 12790 |
| | SNGYNYL | | | | | |
| | D | | | | | |
| 335 | RSSQSLLH | 12271 | GASSLQS | 12531 | MQTLQTPFT | 12791 |
| | SNGYNYL | | | | | |
| | D | | | | | |
| 336 | RSSQSLLH | 12272 | LGSDRAS | 12532 | MQALQTPLT | 12792 |
| | SNGYNYL | | | | | |
| | D | | | | | |
| 337 | KSSQTVF- | 12273 | WASTRES | 12533 | QQYYSTPLT | 12793 |
| | STSYN- | | | | | |
| | KNYLA | | | | | |
| 338 | KTSQSVF- | 12274 | WASTRES | 12534 | QQYYSSPPT | 12794 |
| | STSYN- | | | | | |
| | RDYLA | | | | | |
| 339 | RASQSISS | 12275 | DASTLQS | 12535 | QQSYSTPFT | 12795 |
| | WLA | | | | | |
| 340 | RASQSIS- | 12276 | DASNLKT | 12536 | QQSYSFPT | 12796 |
| | SYLN | | | | | |
| 341 | RASQSVSS | 12277 | DTSSRAT | 12537 | QQYYDTPYT | 12797 |
| | YLA | | | | | |
| 342 | KSS- | 12278 | LASTREP | 12538 | QQYYSTPPT | 12798 |
| | QSVLYSSN | | | | | |
| | NKNYLA | | | | | |
| 343 | KSS- | 12279 | WASTRES | 12539 | QQYYSTPLT | 12799 |
| | QSVLSSSY | | | | | |
| | NKNYVA | | | | | |
| 344 | QASQDIS | 12280 | AAASLQS | 12540 | QQTYSTPWT | 12800 |
| | NYLN | | | | | |
| 345 | RASQDIN- | 12281 | AASSLQS | 12541 | QQSSSFPLT | 12801 |
| | TYLA | | | | | |
| 346 | QASQDIS | 12282 | AASSLQS | 12542 | QQLYNFPYT | 12802 |
| | NYLN | | | | | |
| 347 | RASQSISR | 12283 | GASTRES | 12543 | QQSYNTPLT | 12803 |
| | YLA | | | | | |
| 348 | RASQTLSG | 12284 | GASTLQG | 12544 | QQYYSYPPT | 12804 |
| | WLA | | | | | |
| 349 | FASQDI- | 12285 | EASNLET | 12545 | QQSYSTPLT | 12805 |
| | INYLN | | | | | |
| 350 | RASQSIS- | 12286 | DVFNLGT | 12546 | QQSYSSPFT | 12806 |
| | SYLN | | | | | |
| 351 | QASQDIS | 12287 | MASNLES | 12547 | QQTNSFPLT | 12807 |
| | NYLN | | | | | |
| 352 | RASQSIS- | 12288 | DASNLET | 12548 | QQSYSTPLT | 12808 |
| | SYLN | | | | | |
| 353 | RSSQSLLH | 12289 | LGSNRAS | 12549 | MQALQSPWT | 12809 |
| | SNGYNYL | | | | | |
| | D | | | | | |
| 354 | KSS- | 12290 | WASTRES | 12550 | QQYYSSPLT | 12810 |
| | QSVLYSSN | | | | | |
| | NKNYLA | | | | | |
| 355 | RSSQSLLH | 12291 | LGSNRAS | 12551 | MQALQTPPS | 12811 |
| | SNGYNYL | | | | | |
| | D | | | | | |
| 356 | RAS- | 12292 | KASRLES | 12552 | QQSYKTPYT | 12812 |
| | ESVST- | | | | | |
| | WLA | | | | | |
| 357 | KSS- | 12293 | WASTRES | 12553 | QQYFTTPLT | 12813 |
| | QSVLYSSN | | | | | |
| | NKNYLA | | | | | |
| 358 | RASQSIS- | 12294 | AASSLQS | 12554 | QQSYSTPYT | 12814 |
| | SYLN | | | | | |
| 359 | KSS- | 12295 | WASTRAS | 12555 | QQYYDTPLT | 12815 |
| | QSVLSSSY | | | | | |
| | NKNYLA | | | | | |
| 360 | RASQSIS- | 12296 | KASTLES | 12556 | QQNDSIPIT | 12816 |
| | SYLN | | | | | |
| 361 | RASQSISR | 12297 | DASNLET | 12557 | LQDYSYPLT | 12817 |
| | WLA | | | | | |
| 362 | KTSQSVF- | 12298 | WASTRAA | 12558 | QQYYYTST | 12818 |
| | STSYN- | | | | | |
| | RDYLA | | | | | |
| 363 | RASQSIN- | 12299 | AASSLQS | 12559 | QQANSFPPT | 12819 |
| | RYLN | | | | | |
| 364 | RASQGISN | 12300 | SASNLQS | 12560 | QQSYSTPLT | 12820 |
| | YLA | | | | | |
| 259 | RASQGISN | 12301 | SASNLQS | 12561 | QQSYSTPLT | 12821 |
| | YLA | | | | | |
| 365 | RASQSIDS | 12302 | KASTLES | 12562 | QQSYSAPLT | 12822 |
| | YLN | | | | | |
| 366 | RASQDIST | 12303 | DASNLET | 12563 | QQVNSDPYT | 12823 |
| | WLA | | | | | |
| 367 | QASQDIS | 12304 | AASTLES | 12564 | QQGDSLPLT | 12824 |
| | NYLN | | | | | |
| 368 | RASQGISN | 12305 | AASSLQS | 12565 | QQSDSFPYT | 12825 |
| | YLA | | | | | |
| 369 | RASQSVST | 12306 | GASTRAT | 12566 | QQHDSYPLT | 12826 |
| | YLA | | | | | |
| 370 | RASQGIRN | 12307 | AASSLQS | 12567 | QQANSFPPT | 12827 |
| | DLG | | | | | |
| 371 | RAS- | 12308 | KASNLES | 12568 | QQTDSTFIT | 12828 |
| | ESISTYLN | | | | | |
| 372 | RASRNIHD | 12309 | AASTLQT | 12569 | QQTYSTPPT | 12829 |
| | YLN | | | | | |
| 373 | RASQSND | 12310 | KASTLES | 12570 | QQSYSSPLT | 12830 |
| | SYLN | | | | | |
| 374 | RASQSISD | 12311 | AASTLQS | 12571 | QQSYSSPYT | 12831 |
| | FLN | | | | | |
| 375 | QASQDIS | 12312 | AASSLQS | 12572 | QQANRFPLT | 12832 |
| | NYLN | | | | | |
| 376 | QASQDIS | 12313 | KASNLQS | 12573 | QQSYNFPAT | 12833 |
| | NYLN | | | | | |
| 377 | RSSQSLLH | 12314 | LGSNRAS | 12574 | MQGTHWPET | 12834 |
| | SNGYNYL | | | | | |
| | D | | | | | |
| 378 | RASQSIS- | 12315 | DASNLET | 12575 | QQSYSTPLT | 12835 |
| | SYLN | | | | | |
| 379 | RASQGISD | 12316 | DASNLET | 12576 | QQSYILPLT | 12836 |
| | YLA | | | | | |
| 380 | RASQDIN | 12317 | AASSLQS | 12577 | QQSYSAPYT | 12837 |
| | DFLA | | | | | |
| 381 | RASQSISN | 12318 | AASKLES | 12578 | QQSYSSPWT | 12838 |
| | WLA | | | | | |
| 382 | RASQGIDS | 12319 | AASTLES | 12579 | QQAYSFPLT | 12839 |
| | WLA | | | | | |
| 383 | RASQNIGT | 12320 | RASSLES | 12580 | QQAYSFPWT | 12840 |
| | WLA | | | | | |
| 384 | RASQNIN | 12321 | KASTLQS | 12581 | QQADSFPPT | 12841 |
| | NWLA | | | | | |
| 385 | RASQDIS- | 12322 | AASTLQS | 12582 | QQLNRYPIT | 12842 |
| | SYLA | | | | | |
| 386 | RASQDISN | 12323 | AASILHS | 12583 | QQYDSSFIT | 12843 |
| | YLA | | | | | |

TABLE 23
CDRs using the Chothia Numbering Scheme
Table 5-Chothia CDR Sequences

| Binder | | | | | | |
|---|---|---|---|---|---|---|
| Name | | | | | | |
| | HCDR1 | | HCDR2 | | HCDR3 | |
| | | SEQ ID | | SEQ ID | | SEQ ID |
| | Sequence | NO: | Sequence | NO: | Sequence | NO: |
| 109 | GYTFSSY | 3077 | LPGSGS | 3591 | ARRAYGYDGGFDY | 4105 |
| 110 | GYTFSSY | 3078 | LPGSGS | 3592 | ARRAYGYDEGFDY | 4106 |
| 111 | GYTFSSY | 3079 | LPGSDS | 3593 | ARRAYGYDEGFDY | 4107 |
| 112 | AYTFSIY | 3080 | LPGSGS | 3594 | ARRAYGYDGGFDY | 4108 |
| 1 | GYTFSSY | 3081 | FPGSGH | 3595 | ARRGYGYDEGFDY | 4109 |
| 113 | GYTFSSY | 3082 | LPGSGS | 3596 | ARRGYGYDEGFDY | 4110 |
| 114 | GYTFSSY | 3083 | LPGSGS | 3597 | ARRGYGYDEGFDY | 4111 |
| 115 | GYTFSNY | 3084 | LPGSGS | 3598 | ARRGYGYDEGFDY | 4112 |
| 23 | GYTFSSY | 3085 | LPGSGS | 3599 | ARRGYGYDEGFDY | 4113 |
| 116 | GYTFSSY | 3086 | LPGSGY | 3600 | ARRGYGYDEGFDY | 4114 |
| 117 | GYTFSSY | 3087 | LPGSGS | 3601 | ARRAYGYDEGFDY | 4115 |
| 2 | GYTLSSY | 3088 | LPGSGS | 3602 | ARRGYGYDEGFDY | 4116 |
| 118 | GYTFSSY | 3089 | LPGSGS | 3603 | ARRAYGYDEGFDY | 4117 |
| 119 | GYTFSSY | 3090 | SPGSGS | 3604 | ARRGYGYDEGFDY | 4118 |
| 120 | GYTFGTY | 3091 | LPGSGT | 3605 | ARRAYGYDAGFDY | 4119 |
| 121 | GYTFSSY | 3092 | LPGSGS | 3606 | ARRGYGYDEGFDY | 4120 |
| 122 | GYTFSSY | 3093 | LPGSGR | 3607 | ARRGYGYDEGFDY | 4121 |
| 123 | GYTFSSY | 3094 | LPGSGR | 3608 | ARRGYGYDEGFDY | 4122 |
| 38 | GYTFSSY | 3095 | LPGSGS | 3609 | ARRAYGYDEGFDY | 4123 |
| 39 | GYTFSSY | 3096 | LPGSGS | 3610 | ARRAYGYDEGFDY | 4124 |
| 40 | GYTFSSY | 3097 | LPGSGR | 3611 | ARRGYGYDEGFDY | 4125 |
| 41 | GYTFSSY | 3098 | LPGSGS | 3612 | ARRAYGYDEGFDY | 4126 |
| 42 | GYTFSSY | 3099 | LPGSGR | 3613 | ARRGYGYDEGFDY | 4127 |
| 43 | GYTFSSY | 3100 | LPGSGS | 3614 | ARRAYGYDGGFDY | 4128 |
| 44 | GYTFSSY | 3101 | LPGSDS | 3615 | ARRAYGYDEGFDY | 4129 |
| 45 | AYTFSIY | 3102 | LPGSGS | 3616 | ARRAYGYDGGFDY | 4130 |
| 46 | GYTFSSY | 3103 | FPGSGH | 3617 | ARRGYGYDEGFDY | 4131 |
| 47 | GYTFSNY | 3104 | LPGSGS | 3618 | ARRGYGYDEGFDY | 4132 |
| 47 | GYTFSNY | 3104 | LPGSGS | 3618 | ARRGYGYDEGFDY | 4132 |
| 48 | GYTFSSY | 3105 | LPGSGS | 3619 | ARRGYGYDEGFDY | 4133 |
| 48 | GYTFSSY | 3105 | LPGSGS | 3619 | ARRGYGYDEGFDY | 4133 |
| 49 | GYTFSSY | 3106 | LPGSGY | 3620 | ARRGYGYDEGFDY | 4134 |
| 50 | GYTLSSY | 3107 | LPGSGS | 3621 | ARRGYGYDEGFDY | 4135 |
| 51 | GYTFSSY | 3108 | SPGSGS | 3622 | ARRGYGYDEGFDY | 4136 |
| 52 | GYTFGTY | 3109 | LPGSGT | 3623 | ARRAYGYDAGFDY | 4137 |
| 53 | GYTFSSY | 3110 | LPGSGS | 3624 | ARRGYGYDEGFDY | 4138 |
| 54 | GYTFSSY | 3111 | LPGSGR | 3625 | ARRGYGYDEGFDY | 4139 |
| 55 | GYTFSNY | 3112 | LPGSGS | 3626 | ARRGYGYDEGFDY | 4140 |
| 56 | GYTFSSY | 3113 | LPGSGS | 3627 | ARRGYGYDEGFDY | 4141 |
| 3 | GYSFTGY | 3114 | SSYNGA | 3628 | ARGRYGEYFDY | 4142 |
| 4 | GYSFTGY | 3115 | SSYNGV | 3629 | ARGRYGDYFDY | 4143 |
| 5 | GYSFTGY | 3116 | SSYNGV | 3630 | ARGRYGDYFDY | 4144 |
| 6 | GYSFTGY | 3117 | SSYNGV | 3631 | ARGRYGDYFDY | 4145 |
| 7 | GYSFTGY | 3118 | SSYNGA | 3632 | ARGRYGDYFDY | 4146 |
| 8 | GYSFTGY | 3119 | SSYNGV | 3633 | ARGRYGDYFDY | 4147 |
| 9 | GYSFTGY | 3120 | SSYNGV | 3634 | ARGRYGDYFDY | 4148 |
| 10 | GYSFTGY | 3121 | SSYNGV | 3635 | ARGRYGDYFDY | 4149 |
| 11 | GYSFTGY | 3122 | SSYNGV | 3636 | ARGRYGDYFDY | 4150 |
| 12 | GYSFTGF | 3123 | SSYNGA | 3637 | ARGRYGDYFDY | 4151 |
| 13 | GYSFTGY | 3124 | SSYNGA | 3638 | ARGRYGDYFDY | 4152 |
| 57 | GYSFTGY | 3125 | SSYNGV | 3639 | ARGRYGDYFDY | 4153 |
| 58 | GYSFTGY | 3126 | SSYNGA | 3640 | ARGRYGEYFDY | 4154 |
| 124 | GFSLSSY | 3127 | WRGGS | 3641 | AKNLYGHYVMDY | 4155 |
| 125 | GFSVTSY | 3128 | WRGGS | 3642 | AKNLYGHYVMDY | 4156 |
| 126 | GFSLTSY | 3129 | WRGGS | 3643 | AKNLYGHYVMDY | 4157 |
| 127 | GFSLTRY | 3130 | WRGGS | 3644 | AKNLYGHYVMDY | 4158 |
| 128 | GFSVTTY | 3131 | WRGGS | 3645 | AKNLYGHYVMDY | 4159 |
| 129 | GFSVTSY | 3132 | WRGGS | 3646 | AKNLYGHYVMDY | 4160 |
| 130 | GFSLTRY | 3133 | WRGGS | 3647 | AKNLYGHYVMDY | 4161 |
| 59 | GFSLSSY | 3134 | WRGGS | 3648 | AKNLYGHYVMDY | 4162 |
| 60 | GFSVTSY | 3135 | WRGGS | 3649 | AKNLYGHYVMDY | 4163 |
| 61 | GFSLTSY | 3136 | WRGGS | 3650 | AKNLYGHYVMDY | 4164 |
| 62 | GFSLTRY | 3137 | WRGGS | 3651 | AKNLYGHYVMDY | 4165 |
| 63 | GFSVTTY | 3138 | WRGGS | 3652 | AKNLYGHYVMDY | 4166 |
| 131 | GYTFTSY | 3139 | HPNSGS | 3653 | ARWGDGYSFAY | 4167 |
| 132 | GYTFTSY | 3140 | HPNSGS | 3654 | ARWGDGYSFAY | 4168 |
| 133 | GYTFTTY | 3141 | HPNSDN | 3655 | ARWGDGYSFAY | 4169 |
| 14 | GYTFTSY | 3142 | HPNSGT | 3656 | ARWGDGYSFAY | 4170 |
| 134 | GYTFTSY | 3143 | HPNSGN | 3657 | ARWGDGYSFAY | 4171 |
| 64 | GYTFTSY | 3144 | HPNSGS | 3658 | ARWGDGYSFAY | 4172 |
| 65 | GYTFTSY | 3145 | HPNSGT | 3659 | ARWGDGYSFAY | 4173 |
| 135 | GYTFTDY | 3146 | YPGSGS | 3660 | ARRGERGPWFAY | 4174 |
| 136 | GYTFTDY | 3147 | YPGSGS | 3661 | ARRGERGPWFAY | 4175 |
| 137 | GYTFTDY | 3148 | YPGSGS | 3662 | ARRGERGPWFAY | 4176 |
| 138 | GYTFTDY | 3149 | YPGSGS | 3663 | ARRGERGPWFAY | 4177 |
| 15 | GYTFTDY | 3150 | YPGSGS | 3664 | ARRGERGPWFAY | 4178 |
| 66 | GYTFTDY | 3151 | YPGSGS | 3665 | ARRGERGPWFAY | 4179 |
| 67 | GYTFTDY | 3152 | YPGSGS | 3666 | ARRGERGPWFAY | 4180 |
| 68 | GYTFTDY | 3153 | YPGSGS | 3667 | ARRGERGPWFAY | 4181 |
| 69 | GYTFTDY | 3154 | YPGSGS | 3668 | ARRGERGPWFAY | 4182 |
| 24 | GYTFTNY | 3155 | DPSDSE | 3669 | ATYDVYYRFAY | 4183 |
| 139 | GYTFTNY | 3156 | DPSDSE | 3670 | ATYDGYYRFAY | 4184 |
| 140 | GYTFTNY | 3157 | DPSDSE | 3671 | ATYDIYYRFAY | 4185 |
| 16 | GYTFTSY | 3158 | HPNSGS | 3672 | ARPGGYGFVY | 4186 |
| 141 | GYTFTSY | 3159 | HPNSDS | 3673 | ARPGGYGFAD | 4187 |
| 142 | GYTFTTY | 3160 | HPNSGS | 3674 | ARPGGYGFTY | 4188 |
| 143 | GYTFTSY | 3161 | HPNSGS | 3675 | ARPGGYGFAY | 4189 |
| 70 | GYTFTSY | 3162 | HPNSGS | 3676 | ARPGGYGFAY | 4190 |
| 25 | GYTFTSY | 3163 | YPSDSY | 3677 | TRGNYIDY | 4191 |
| 144 | GYTFTSY | 3164 | YPSDSY | 3678 | TRGNYIDY | 4192 |
| 145 | GYTFTDY | 3165 | YPSDSY | 3679 | TRGNYIDY | 4193 |
| 146 | GYTFTDY | 3166 | YPGSGS | 3680 | ARPGDLGFAY | 4194 |
| 147 | GYTFTDY | 3167 | YPGSGS | 3681 | ARPGDLGFAY | 4195 |
| 148 | GYTFTDY | 3168 | YPGSGS | 3682 | ARPGDLGFAY | 4196 |
| 71 | GYTFTDY | 3169 | YPGSGS | 3683 | ARPGDLGFAY | 4197 |
| 72 | GYTFTDY | 3170 | YPGSGS | 3684 | ARPGDLGFAY | 4198 |
| 73 | GYTFTDY | 3171 | YPGSGS | 3685 | ARPGDLGFAY | 4199 |
| 74 | GYTFTDY | 3172 | YPGSGS | 3686 | ARPGDLGFAY | 4200 |
| 74 | GYTFTDY | 3172 | YPGSGS | 3686 | ARPGDLGFAY | 4200 |
| 75 | GYTFTDY | 3173 | YPGSGS | 3687 | ARPGDLGFAY | 4201 |
| 75 | GYTFTDY | 3173 | YPGSGS | 3687 | ARPGDLGFAY | 4201 |
| 76 | GYTFTDY | 3174 | YPGSGS | 3688 | ARPGDLGFAY | 4202 |
| 149 | GFSLTNY | 3175 | WAGGI | 3689 | ARGDGYDDGYAMDY | 4203 |
| 150 | GFSLTSY | 3176 | WAGGI | 3690 | ARGDGYDDGYAMDY | 4204 |
| 26 | GFSLTSY | 3177 | WAGGT | 3691 | ARGDGYDDGYAMDY | 4205 |
| 77 | GFSLTNY | 3178 | WAGGI | 3692 | ARGDGYDDGYAMDY | 4206 |
| 78 | GFSLTSY | 3179 | WAGGI | 3693 | ARGDGYDDGYAMDY | 4207 |
| 79 | GFSLTSY | 3180 | WAGGT | 3694 | ARGDGYDDGYAMDY | 4208 |
| 151 | GYSFTSY | 3181 | DPSDSE | 3695 | ARTRNY | 4209 |
| 152 | GYSFTSY | 3182 | DPSDSE | 3696 | ARTRNY | 4210 |
| 153 | GYSFTSY | 3183 | DPSDSE | 3697 | ARTRNY | 4211 |
| 154 | GFNIKDY | 3184 | DPENGD | 3698 | NAPLLRYSSAMDY | 4212 |
| 155 | GFNIKDY | 3185 | DPENGD | 3699 | NAPLLRYSSSMDY | 4213 |
| 156 | GFNIKDY | 3186 | DPENGD | 3700 | NVALLRYSSAMDY | 4214 |
| 80 | GFNIKDY | 3187 | DPENGD | 3701 | NAPLLRYSSAMDY | 4215 |
| 81 | GFNIKDY | 3188 | DPENGD | 3702 | NAPLLRYSSSMDY | 4216 |
| 82 | GFNIKDY | 3189 | DPENGD | 3703 | NVALLRYSSAMDY | 4217 |
| 17 | GFNIKDT | 3190 | DPANGN | 3704 | ARGPDDGYFYYYSMDY | 4218 |
| 157 | GYTFSNY | 3191 | NPSNGD | 3705 | TSYYTHEAYYYAMDC | 4219 |
| 27 | GSTFTTY | 3192 | NPSNGG | 3706 | TSYYTHETYYYAMDY | 4220 |
| 158 | GFNIKDY | 3193 | DPEDGD | 3707 | TPYSIYDAMDY | 4221 |
| 159 | GYTFTDY | 3194 | YPGSGS | 3708 | ARRGERGPWFAY | 4222 |
| 83 | GYTFTDY | 3195 | YPGSGS | 3709 | ARRGERGPWFAY | 4223 |
| 160 | GYSFTDY | 3196 | STYYGD | 3710 | ARQMDYDYTYYYAMDY | 4224 |
| 28 | GYTFTSY | 3197 | DPSDSY | 3711 | ARAEYGYGNYPWFAY | 4225 |
| 84 | GYTFTSY | 3198 | DPSDSY | 3712 | ARAEYGYGNYPWFAY | 4226 |
| 29 | GYTFTSY | 3199 | HPSDSD | 3713 | AIPYYYGGWYFDV | 4227 |
| 161 | GYTFTDY | 3200 | YPGSGS | 3714 | ARMDGPWFAY | 4228 |
| 30 | GFTFSSY | 3201 | SSGGSY | 3715 | ARLYDAHWDYFDY | 4229 |
| 162 | GISLSTSGM | 3202 | WNND | 3716 | AWRPYYRYDSFAY | 4230 |
| 18 | GYTFTNY | 3203 | NTYTGE | 3717 | ARKYYDYEFAY | 4231 |
| 85 | GYTFTNY | 3204 | NTYTGE | 3718 | ARKYYDYEFAY | 4232 |
| 163 | GYTFTDY | 3205 | DPETGG | 3719 | TRLGDYDVMDY | 4233 |
| 86 | GYTFTDY | 3206 | DPETGG | 3720 | TRLGDYDVMDY | 4234 |
| 164 | GYTFTSY | 3207 | DPSDSY | 3721 | ARAGRYGSSFDY | 4235 |
| 165 | GFSLSTSGM | 3208 | YWDDD | 3722 | AGRPDDYDGAWFPY | 4236 |
| 31 | GYTFTSS | 3209 | HPNSGN | 3723 | AIYYDYDAYYFDY | 4237 |
| 87 | GYTFTSS | 3210 | HPNSGN | 3724 | AIYYDYDAYYFDY | 4238 |
| 32 | GYTFTSY | 3211 | HPNSGS | 3725 | ANPYYGYDVGY | 4239 |
| 166 | GYTFTDY | 3212 | YPGSGS | 3726 | AREEKIYFDY | 4240 |
| 88 | GYTFTDY | 3213 | YPGSGS | 3727 | AREEKIYFDY | 4241 |
| 167 | GYTFTSY | 3214 | HPNSGS | 3728 | ARYDGYWFDY | 4242 |
| 168 | GYTFTSY | 3215 | YPGNSD | 3729 | TSLITTAYYFDY | 4243 |
| 89 | GYTFTSY | 3216 | YPGNSD | 3730 | TSLITTAYYFDY | 4244 |
| 169 | GYTFTSY | 3217 | HPNSGS | 3731 | APETGDYGSSYVWYFDV | 4245 |
| 170 | GYTFTDY | 3218 | YPGSGS | 3732 | ARGKVTRFAY | 4246 |
| 171 | GFTFSSY | 3219 | SDGGSY | 3733 | ARDQDSNWEYFDY | 4247 |
| 172 | GYTFTDY | 3220 | NTETGE | 3734 | ARESWDRAMDY | 4248 |
| 19 | GFTFSSY | 3221 | SSGGSY | 3735 | ARHEEANWAWFAY | 4249 |
| 90 | GFTFSSY | 3222 | SSGGSY | 3736 | ARHEEANWAWFAY | 4250 |
| 173 | GYSFTNY | 3223 | DPSDSE | 3737 | AIPYYAMDY | 4251 |
| 91 | GYSFTNY | 3224 | DPSDSE | 3738 | AIPYYAMDY | 4252 |
| 174 | GYTFTSS | 3225 | HPNSGN | 3739 | ATYYGNYVWYFDV | 4253 |
| 92 | GYTFTSS | 3226 | HPNSGN | 3740 | ATYYGNYVWYFDV | 4254 |
| 175 | GYTFTSY | 3227 | HPNSGS | 3741 | ASYGSSYWYFDV | 4255 |
| 93 | GYTFTSY | 3228 | HPNSGS | 3742 | ASYGSSYWYFDV | 4256 |
| 20 | GFSLTSY | 3229 | WSGGS | 3743 | ASYYGSSRSYWYLDV | 4257 |
| 94 | GFSLTSY | 3230 | WSGGS | 3744 | ASYYGSSRSYWYLDV | 4258 |
| 176 | GYTFTSY | 3231 | YSGNGD | 3745 | ARDYYGSSHLWYFDV | 4259 |
| 177 | GFSLSTSGM | 3232 | YWDDD | 3746 | ARRAHYDYGWYFDV | 4260 |
| 178 | GYTFTSY | 3233 | HPNSGS | 3747 | AGYDYDWYFDV | 4261 |
| 33 | GFTFSSY | 3234 | SSGGSY | 3748 | TRHDDSSYDWFAY | 4262 |
| 179 | GFTFSSY | 3235 | SSGGSY | 3749 | ARHEDSNYHYFDY | 4263 |
| 34 | GYTFTNY | 3236 | HPNSGT | 3750 | ARFGDGYHFDY | 4264 |
| 180 | GFTFSSY | 3237 | SSGGSY | 3751 | ARQNDSSWAWFAY | 4265 |
| 95 | GFTFSSY | 3238 | SSGGSY | 3752 | ARQNDSSWAWFAY | 4266 |
| 181 | GYTFTSY | 3239 | HPNSGS | 3753 | ALPYSNYGWYFDV | 4267 |
| 96 | GYTFTSY | 3240 | HPNSGS | 3754 | ALPYSNYGWYFDV | 4268 |
| 182 | GYTFTSY | 3241 | DPSDSE | 3755 | ARDYYGSYWYFDV | 4269 |
| 97 | GYTFTSY | 3242 | DPSDSE | 3756 | ARDYYGSYWYFDV | 4270 |
| 183 | GFNIKDY | 3243 | DPEDGE | 3757 | AAYGNSAWFAY | 4271 |
| 98 | GFNIKDY | 3244 | DPEDGE | 3758 | AAYGNSAWFAY | 4272 |
| 35 | GYTFTNY | 3245 | NTNTGE | 3759 | ARWYPYFDY | 4273 |
| 99 | GYTFTNY | 3246 | NTNTGE | 3760 | ARWYPYFDY | 4274 |
| 100 | GYTFTNY | 3247 | NTNTGE | 3761 | ARWYPYFDY | 4275 |
| 36 | GYTFTSY | 3248 | NPSSGY | 3762 | ARSDGSSGNWYFDV | 4276 |
| 101 | GYTFTSY | 3249 | NPSSGY | 3763 | ARSDGSSGNWYFDV | 4277 |
| 184 | GFSLTSY | 3250 | WAGGS | 3764 | AREGGYTGYFDV | 4278 |
| 102 | GFSLTSY | 3251 | WAGGS | 3765 | AREGGYTGYFDV | 4279 |
| 185 | GYTFTSY | 3252 | DPSDSE | 3766 | AYSNYVPYYAMDY | 4280 |
| 103 | GYTFTSY | 3253 | DPSDSE | 3767 | AYSNYVPYYAMDY | 4281 |
| 186 | GYTFTDY | 3254 | YPGSGS | 3768 | ARRGFDY | 4282 |
| 21 | GFTFSSY | 3255 | SSGGSY | 3769 | ARHNYSNWDWFAY | 4283 |
| 187 | GYTFTSY | 3256 | HPNSGS | 3770 | ARDYYGSGYGYYFDY | 4284 |
| 188 | GYTFTSY | 3257 | HPNSGS | 3771 | ARDYYGSSYGWYFDV | 4285 |
| 189 | GYTFTSY | 3258 | HPNSGS | 3772 | ARDYYGSSYGWYFDV | 4286 |
| 190 | GYTFTSY | 3259 | HPNSGS | 3773 | ASDYYGSSYGWYFDV | 4287 |
| 191 | GYTFTSY | 3260 | HPNSGS | 3774 | ARDYYGSSYGWYFDV | 4288 |
| 192 | GYTFTSY | 3261 | HPNSGS | 3775 | TRDYYGSGYGWYFDV | 4289 |
| 193 | GYTFTNY | 3262 | DPSDSE | 3776 | ATYDGYYRFAY | 4290 |
| 194 | GYTFTNY | 3263 | DPSDSE | 3777 | ATYDVYYRFAY | 4291 |
| 195 | GYTFTSY | 3264 | HPNSGS | 3778 | ARDYGNYDYAMDY | 4292 |
| 104 | GYTFTSY | 3265 | HPNSGS | 3779 | ARDYGNYDYAMDY | 4293 |
| 37 | GYTFTSY | 3266 | HPNSGS | 3780 | ARDYGNYDYAMDY | 4294 |
| 196 | GYTFTSY | 3267 | HPNSGS | 3781 | ARDYGNYDYAMDY | 4295 |
| 197 | GFTFSSY | 3268 | SSGGSY | 3782 | ASQLTGTWYYFDY | 4296 |
| 198 | GFTFSSY | 3269 | SSGGSY | 3783 | ASQLTGTWYYFDY | 4297 |
| 199 | GFTFSSY | 3270 | SSGGSY | 3784 | ASQLTGTWYYFDY | 4298 |
| 22 | GFNIKDT | 3271 | DPANGN | 3785 | ARGPDDGYFYYYSMDY | 4299 |
| 200 | GFTFSNY | 3272 | NSNGGS | 3786 | ARQEGIGYAMDY | 4300 |
| 201 | GYTFTEY | 3273 | YPNNGG | 3787 | ARGGWLLGY | 4301 |
| 202 | GFSLTSY | 3274 | WSGGS | 3788 | ARDGGIRGAMDY | 4302 |
| 203 | GYTFSSY | 3275 | LPGSGS | 3789 | ARRGYGYDEGFDY | 4303 |
| 204 | GYTFTDY | 3276 | DPETGG | 3790 | TRNYDYAMDY | 4304 |
| 205 | GFTFSSY | 3277 | NSNGGS | 3791 | ARQEGIGYALDY | 4305 |
| 206 | GFTFSSY | 3278 | SSGGS | 3792 | AREREWGVYYGSSLDY | 4306 |
| 207 | GFNIKDT | 3279 | DPANGN | 3793 | ARSDGNYD | 4307 |
| 208 | GFTFSNY | 3280 | NSNGGS | 3794 | ARQEGIGYGMDY | 4308 |
| 209 | GFTFNTY | 3281 | RSKSDNYA | 3795 | VRHDGVVGFDV | 4309 |
| 210 | GYSITSGY | 3282 | SYDGS | 3796 | ARGGGRG | 4310 |
| 211 | GYTFTDY | 3283 | NTETGE | 3797 | ARDYYDYYYAMDY | 4311 |
| 212 | GYTFTDY | 3284 | NTETGE | 3798 | ARESWDRAMDY | 4312 |
| 213 | GYTFTNY | 3285 | DPYDSE | 3799 | ARIYSDYDGAWFAY | 4313 |
| 214 | GYTFTDY | 3286 | NPYNGG | 3800 | ARGTVGFAY | 4314 |
| 215 | GFTFSSY | 3287 | SSGGS | 3801 | AREREWGVFYGSSLDY | 4315 |
| 216 | GFTFSSY | 3288 | SSGGSY | 3802 | ARHDDSSYGYFDY | 4316 |
| 217 | GFTFSNY | 3289 | SSGGT | 3803 | ARTMPDV | 4317 |
| 218 | GFSLTSY | 3290 | WAGGS | 3804 | ARDTDGYYWAMDY | 4318 |
| 219 | GYSITSDH | 3291 | SYSGS | 3805 | ARKWGDY | 4319 |
| 220 | GYTFTDY | 3292 | DPETGG | 3806 | TRNYDYALDY | 4320 |
| 221 | GYSITSGY | 3293 | SYDGS | 3807 | ARGGGRG | 4321 |
| 222 | GFTFSNY | 3294 | NSNGGS | 3808 | ARQEEIGYAMDY | 4322 |
| 223 | GFNIKDY | 3295 | DPETDN | 3809 | ARSGNMGFTY | 4323 |
| 105 | GFNIKDY | 3296 | DPETDN | 3810 | ARSGNMGFTY | 4324 |
| 224 | GFTFSSY | 3297 | SSGGSY | 3811 | ASQGGSSWGAMDY | 4325 |
| 106 | GFTFSSY | 3298 | SSGGSY | 3812 | ASQGGSSWGAMDY | 4326 |
| 225 | GFTFSSY | 3299 | SNGGSY | 3813 | ARHEITTRFAY | 4327 |
| 226 | GYSITSGY | 3300 | SYDGS | 3814 | AREAGYFDY | 4328 |
| 227 | GFSFNTY | 3301 | RSKSNNYA | 3815 | VRQYGYDFDY | 4329 |
| 228 | GFTFSSY | 3302 | SSGGSY | 3816 | ARHKGVNWDYFDY | 4330 |
| 229 | GYTFTDY | 3303 | DPETGG | 3817 | TRGDGNYDSWYFDV | 4331 |
| 230 | GFTFSSY | 3304 | SSGGSY | 3818 | ARLPVTTVVFDY | 4332 |
| 231 | GFTFSSY | 3305 | SSGGSY | 3819 | ARRPVVVPFDY | 4333 |
| 232 | GFSLTSY | 3306 | WSGGS | 3820 | ARGWDADYFDY | 4334 |
| 233 | GYTFTNY | 3307 | HPNSGS | 3821 | TRYDYDDY | 4335 |
| 234 | GYTFTDY | 3308 | NPNNGG | 3822 | ARSELGLYAMDY | 4336 |
| 235 | GYTFTGY | 3309 | LPGSGS | 3823 | ARGRIHYFDY | 4337 |
| 236 | GYTFTGY | 3310 | LPGSGS | 3824 | ARGRIHYFDY | 4338 |
| 237 | GFSLTSY | 3311 | WSGGS | 3825 | ARKGYGYDWYFDV | 4339 |
| 107 | GFSLTSY | 3312 | WSGGS | 3826 | ARKGYGYDWYFDV | 4340 |
| 238 | GYTFTSY | 3313 | DPSDSY | 3827 | ARSSYYYYAMDY | 4341 |
| 108 | GYTFTSY | 3314 | DPSDSY | 3828 | ARSSYYYYAMDY | 4342 |
| 239 | GYSITSGY | 3315 | SYDGS | 3829 | ARGGGRD | 4343 |
| 240 | GFSLTSY | 3316 | WSGGS | 3830 | ARGGDYDSYAMDY | 4344 |
| 241 | GYTFTSY | 3317 | YPGSGS | 3831 | ARESVYDGYSWYFDV | 4345 |
| 242 | GYSFTDY | 3318 | NPNYGT | 3832 | ASTYDYDDWYFDV | 4346 |
| 243 | GYTFTSY | 3319 | DPSDSY | 3833 | ARSGNYLYAMDY | 4347 |
| 244 | GYSFTDY | 3320 | NPNYGT | 3834 | AREGTSWYFDV | 4348 |
| 245 | GFSLTSY | 3321 | WRGGS | 3835 | AKKGDGYDWYFDV | 4349 |
| 246 | GFSLTSY | 3322 | WSGGS | 3836 | AREGNYGSSYDAMDY | 4350 |
| 247 | GYTFTSY | 3323 | DPSDSY | 3837 | ARSSNYPYAMDY | 4351 |
| 248 | GFNIKNT | 3324 | DPANGN | 3838 | AYYSGLY | 4352 |
| 249 | GYTFTSY | 3325 | DPSDSE | 3839 | ARRGQIYYGYSWFAY | 4353 |
| 250 | GYTFTDY | 3326 | NPNNGG | 3840 | ARSTVVADWYFDV | 4354 |
| 251 | GYTFTSY | 3327 | YPRSGN | 3841 | ARSGSSYGYFDV | 4355 |
| 252 | GFSLTSY | 3328 | WSGGS | 3842 | ARKGGYDAYAMDY | 4356 |
| 253 | GYSFTDY | 3329 | NPNYGT | 3843 | AREGFITTVVAVDY | 4357 |
| 254 | GYTFTDY | 3330 | DPETGG | 3844 | TREGNYDAMDY | 4358 |
| 255 | GYTFTSY | 3331 | DPSDSY | 3845 | ARWDYYGVDY | 4359 |
| 256 | GFTFSGY | 3332 | SPGGGS | 3846 | ASSLTATHTYEYDY | 4360 |
| | LCDR1 | | LCDR2 | | LCDR3 | |
| | | SEQ ID | | SEQ ID | | SEQ ID |
| | Sequence | NO: | Sequence | NO: | Sequence | NO: |
| 109 | KASQDIN- | 5644 | KTLIYRANRLVD | 7505 | LHYDEFPPT | 6664 |
| | SYLS | | | | | |
| 110 | KASQDIN- | 5645 | KTLIYRANRLVD | 7506 | LQYDEFPPT | 6665 |
| | SYLN | | | | | |
| 111 | KASQDIN- | 5646 | KTLIYRANRLVD | 7507 | LQYDEFPPT | 6666 |
| | SYLS | | | | | |
| 112 | KASQDIN- | 5647 | KTLIYRANRLVD | 7508 | LQYDEFPPT | 6667 |
| | SYLS | | | | | |
| 1 | KASQDIN- | 5648 | KTLIYRANRLVD | 7509 | LQYDEFPPT | 6668 |
| | SYLS | | | | | |
| 113 | KASQDIN- | 5649 | KTLIYRANRLVD | 7510 | PQYVESPPT | 6669 |
| | SYLS | | | | | |
| 114 | KASQDIN- | 5650 | KTLIYRANRLVD | 7511 | LQYDEFPPT | 6670 |
| | SYLS | | | | | |
| 115 | KASQDIN- | 5651 | KTLIYRANRLVD | 7512 | LQYDEFPPT | 6671 |
| | SYLS | | | | | |
| 23 | KASQDIN- | 5652 | KTLIYRANRLVD | 7513 | LQYDEFPPT | 6672 |
| | SYLS | | | | | |
| 116 | KASQDIN- | 5653 | KTLIYRANRLVD | 7514 | LQYDEFPPT | 6673 |
| | SYLS | | | | | |
| 117 | KASQDIN- | 5654 | KTLIYRANRLVD | 7515 | LQYDEFPLT | 6674 |
| | SYLS | | | | | |
| 2 | KASQDIN- | 5655 | KTLIYRANRLVD | 7516 | LQYDEFPPT | 6675 |
| | SYLS | | | | | |
| 118 | KASQDIN- | 5656 | QTLLYRANRLVD | 7517 | LQYDEFPPT | 6676 |
| | GYLS | | | | | |
| 119 | KASQDIN- | 5657 | KTLIYRANRLVD | 7518 | LQYDEFPPT | 6677 |
| | SYLS | | | | | |
| 120 | KASQDIN- | 5658 | KTLIYRANRLVD | 7519 | LQYDEFPPT | 6678 |
| | SYLS | | | | | |
| 121 | KASQDIN- | 5659 | KTLIYRANRLVD | 7520 | LQYDEFPPT | 6679 |
| | SYLN | | | | | |
| 122 | KASQDIN- | 5660 | KTLIYRANRLVD | 7521 | LQYDEFPPT | 6680 |
| | SYLS | | | | | |
| 123 | KASQDIN- | 5661 | KTLIYRAKRLVD | 7522 | LQYDEFPPT | 6681 |
| | SYLS | | | | | |
| 38 | KASQDIN- | 7174 | KTLIYRANRLVD | 7523 | LQYDEFPLT | 6682 |
| | SYLS | | | | | |
| 39 | KASQDIN- | 7175 | QTLLYRANRLVD | 7524 | LQYDEFPPT | 6683 |
| | GYLS | | | | | |
| 40 | KASQDIN- | 7176 | KTLIYRAKRLVD | 7525 | LQYDEFPPT | 6684 |
| | SYLS | | | | | |
| 41 | KASQDIN- | 7177 | QTLLYRANRLVD | 7526 | LQYDEFPPT | 6685 |
| | GYLS | | | | | |
| 42 | KASQDIN- | 7178 | KTLIYRAKRLVD | 7527 | LQYDEFPPT | 6686 |
| | SYLS | | | | | |
| 43 | KASQDIN- | 7179 | KTLIYRANRLVD | 7528 | LHYDEFPPT | 6687 |
| | SYLS | | | | | |
| 44 | KASQDIN- | 7180 | KTLIYRANRLVD | 7529 | LQYDEFPPT | 6688 |
| | SYLS | | | | | |
| 45 | KASQDIN- | 7181 | KTLIYRANRLVD | 7530 | LQYDEFPPT | 6689 |
| | SYLS | | | | | |
| 46 | KASQDIN- | 7182 | KTLIYRANRLVD | 7531 | LQYDEFPPT | 6690 |
| | SYLS | | | | | |
| 47 | KASQDIN- | 7183 | KTLIYRANRLVD | 7532 | LQYDEFPPT | 6691 |
| | SYLS | | | | | |
| 48 | KASQDIN- | 7184 | KTLIYRANRLVD | 7533 | LQYDEFPPT | 6692 |
| | SYLS | | | | | |
| 49 | KASQDIN- | 7185 | KTLIYRANRLVD | 7534 | LQYDEFPPT | 6693 |
| | SYLS | | | | | |
| 50 | KASQDIN- | 7186 | KTLIYRANRLVD | 7535 | LQYDEFPPT | 6694 |
| | SYLS | | | | | |
| 51 | KASQDIN- | 7187 | KTLIYRANRLVD | 7536 | LQYDEFPPT | 6695 |
| | SYLS | | | | | |
| 52 | KASQDIN- | 7188 | KTLIYRANRLVD | 7537 | LQYDEFPPT | 6696 |
| | SYLS | | | | | |
| 53 | KASQDIN- | 7189 | KTLIYRANRLVD | 7538 | LQYDEFPPT | 6697 |
| | SYLN | | | | | |
| 54 | KASQDIN- | 7190 | KTLIYRANRLVD | 7539 | LQYDEFPPT | 6698 |
| | SYLS | | | | | |
| 55 | KASQDIN- | 7191 | KTLIYRANRLVD | 7540 | LQYDEFPPT | 6699 |
| | SYLS | | | | | |
| 56 | KASQDIN- | 7192 | KTLIYRANRLVD | 7541 | LQYDEFPPT | 6700 |
| | SYLS | | | | | |
| 3 | RASENIYS | 5681 | QLLVFAATYLAD | 7542 | QHFWGTPWT | 6701 |
| | NLA | | | | | |
| 4 | RASENIYS | 5682 | QLLVYAATNLAD | 7543 | QHFWGTPWT | 6702 |
| | NLA | | | | | |
| 5 | RASENIYS | 5683 | QVLVYAATNLAD | 7544 | QHFWGSPWT | 6703 |
| | NLA | | | | | |
| 6 | RASENIYS | 5684 | RLLVYAATNLAD | 7545 | QHFWGTPWT | 6704 |
| | NLA | | | | | |
| 7 | RASENIYS | 5685 | QLLVYAATNLAD | 7546 | QHFWGTPWT | 6705 |
| | NLA | | | | | |
| 8 | RASENIYS | 5686 | QVLVYAATNVAD | 7547 | QHFWGTPWT | 6706 |
| | NLA | | | | | |
| 9 | RAS- | 5687 | QLLVYAATNLAD | 7548 | QHFWGTPWT | 6707 |
| | DNIYSNLA | | | | | |
| 10 | RASENIYS | 5688 | RLLVYAATNLAD | 7549 | QHFWGTPWT | 6708 |
| | NLA | | | | | |
| 11 | RASENIYS | 5689 | QLLVYAATNLAD | 7550 | QHFWGTPWT | 6709 |
| | NLA | | | | | |
| 12 | RASENIYS | 5690 | QLLVFAATYLAD | 7551 | QHFWGTPWT | 6710 |
| | NLA | | | | | |
| 13 | RASENIYS | 5691 | QLLVYAATNLAD | 7552 | QHFWGSPWT | 6711 |
| | NLA | | | | | |
| 57 | RAS- | 7193 | QLLVYAATNLAD | 7553 | QHFWGTPWT | 6712 |
| | DNIYSNLA | | | | | |
| 58 | RASENIYS | 7194 | QLLVFAATYLAD | 7554 | QHFWGTPWT | 6713 |
| | NLA | | | | | |
| 124 | KASQDIN- | 5694 | KTLIYRANRLVD | 7555 | LQYDEFPPT | 6714 |
| | SYLS | | | | | |
| 125 | KASEN- | 5695 | KLLIYGASNRYT | 7556 | GQSYSYPFT | 6715 |
| | VVTYVS | | | | | |
| 126 | KASEN- | 5696 | KLLIYGASNRYT | 7557 | GQSYSYPFT | 6716 |
| | VVTYVS | | | | | |
| 127 | KASEN- | 5697 | KLLIYGASNRYT | 7558 | GQSYSYPFT | 6717 |
| | VVTYVS | | | | | |
| 128 | KASEN- | 5698 | KLLIYGASNRYT | 7559 | GQSYSYPFT | 6718 |
| | VVTYVS | | | | | |
| 129 | KASEN- | 5699 | KLLIYGASNRYT | 7560 | GQSYSYLIHVR | 7761 |
| | VVTYVS | | | | | |
| 130 | KASEN- | 5700 | KLLIYGASNRYT | 7561 | GQSYSYLIHVR | 7762 |
| | VVTYVS | | | | | |
| 59 | KASQDIN- | 7195 | KTLIYRANRLVD | 7562 | LQYDEFPPT | 6721 |
| | SYLS | | | | | |
| 60 | KASEN- | 7196 | KLLIYGASNRYT | 7563 | GQSYSYPFT | 6722 |
| | VVTYVS | | | | | |
| 61 | KASEN- | 7197 | KLLIYGASNRYT | 7564 | GQSYSYPFT | 6723 |
| | VVTYVS | | | | | |
| 62 | KASEN- | 7198 | KLLIYGASNRYT | 7565 | GQSYSYPFT | 6724 |
| | VVTYVS | | | | | |
| 63 | KASEN- | 7199 | KLLIYGASNRYT | 7566 | GQSYSYPFT | 6725 |
| | VVTYVS | | | | | |
| 131 | SASSSVSY | 5706 | KRWIYDTSKLAS | 7567 | QQWSSNPLYT | 7763 |
| | MH | | | | | |
| 132 | SASSSVSY | 5707 | KRWIYDTSKLAS | 7568 | QQWSSNPHVHV | 7764 |
| | MH | | | | | |
| 133 | SASSSVSY | 5708 | KRWIYDTSKLAS | 7569 | QQWSSNPLYT | 7765 |
| | MH | | | | | |
| 14 | SASSSVSY | 5709 | KRWIYDTSKLAS | 7570 | QQWSSNPLYT | 7766 |
| | MH | | | | | |
| 134 | SASSSVSY | 5710 | KRWIYDTSKLAS | 7571 | QQWSSNPLYT | 7767 |
| | MH | | | | | |
| 64 | SASSSVSY | 7200 | KRWIYDTSKLAS | 7572 | QQWSSNPLY | 6731 |
| | MH | | | | | |
| 65 | SASSSVSY | 7201 | KRWIYDTSKLAS | 7573 | QQWSSNPLY | 6732 |
| | MH | | | | | |
| 135 | KASQSVD | 5713 | KLLIYAASNLES | 7574 | QQSNEDPLT | 6733 |
| | YD- | | | | | |
| | GDSYMN | | | | | |
| 136 | KASQSVD | 5714 | KLLIYAASNLES | 7575 | QQSNEDPLT | 6734 |
| | YD- | | | | | |
| | GDSYMN | | | | | |
| 137 | KASQSVD | 5715 | QLLIYAASNLQS | 7576 | QQSNEDPLT | 6735 |
| | YD- | | | | | |
| | GDSYMN | | | | | |
| 138 | KASQSVD | 5716 | KLLIYAASNLES | 7577 | QQSNEDPLT | 6736 |
| | YD- | | | | | |
| | GDSYMN | | | | | |
| 15 | KASQSVD | 5717 | KLLIYAASNLES | 7578 | QQSNEDPLT | 6737 |
| | YD- | | | | | |
| | GDSYMN | | | | | |
| 66 | KASQSVD | 7202 | KLLIYAASNLES | 7579 | QQSNEDPLT | 6738 |
| | YD- | | | | | |
| | GDSYMN | | | | | |
| 67 | KASQSVD | 7203 | KLLIYAASNLES | 7580 | QQSNEDPLT | 6739 |
| | YD- | | | | | |
| | GDSYMN | | | | | |
| 68 | KASQSVD | 7204 | QLLIYAASNLQS | 7581 | QQSNEDPLT | 6740 |
| | YD- | | | | | |
| | GDSYMN | | | | | |
| 69 | KASQSVD | 7205 | KLLIYAASNLES | 7582 | QQSNEDPLT | 6741 |
| | YD- | | | | | |
| | GDSYMN | | | | | |
| 24 | KASQDINK | 5722 | SLLIHYTSTLQP | 7583 | LQYDNLMYT | 6742 |
| | YIA | | | | | |
| 139 | KASQDINK | 5723 | RLLIHYTSTLQP | 7584 | LQYDILMYT | 6743 |
| | YIA | | | | | |
| 140 | KASQDINK | 5724 | RLLIHYTSTLQP | 7585 | LQYDILMYT | 6744 |
| | YIA | | | | | |
| 16 | QATQDIV- | 5725 | SFLIYYATELAE | 7586 | LQFYEFPLT | 6745 |
| | KNLN | | | | | |
| 141 | QATQDIV- | 5726 | SFLIYYATELAE | 7587 | LQFYEFPLT | 6746 |
| | KNLN | | | | | |
| 142 | QATQDIV- | 5727 | SFLIYYATELAE | 7588 | LQFYEFPLT | 6747 |
| | KNLN | | | | | |
| 143 | QATQDIV- | 5728 | SFLIYYATELAE | 7589 | LQFYEFPLT | 6748 |
| | KNLN | | | | | |
| 70 | QATQDIV- | 7206 | SFLIYYATELAE | 7590 | LQFYEFPLT | 6749 |
| | KNLN | | | | | |
| 25 | RAS- | 5730 | KLWIYYTSNLAP | 7591 | QQFTSSHT | 7768 |
| | SSVNYMY | | | | | |
| 144 | RAS- | 5731 | KLWIYYTSNLAP | 7592 | QQFTSSHT | 7769 |
| | SSVNYMY | | | | | |
| 145 | RAS- | 5732 | KLWIYYTSNLAP | 7593 | QQFTSSHT | 7770 |
| | SSVNYMY | | | | | |
| 146 | KASQSVD | 5733 | KLLIYAASNLES | 7594 | QQSNKDPLT | 6753 |
| | YD- | | | | | |
| | GDSYMN | | | | | |
| 147 | KASQSVD | 5734 | KLLIYAASNLES | 7595 | QQSNEDPLT | 6754 |
| | YD- | | | | | |
| | GDSYMN | | | | | |
| 148 | KASQSVD | 5735 | KLLIYAASNLES | 7596 | QQSNKDPFT | 6755 |
| | YD- | | | | | |
| | GDSYMN | | | | | |
| 71 | KASQSVD | 7207 | KLLIYAASNLES | 7597 | QQSNKDPLT | 6756 |
| | YD- | | | | | |
| | GDSYMN | | | | | |
| 72 | KASQSVD | 7208 | KLLIYAASNLES | 7598 | QQSNKDPLT | 6757 |
| | YD- | | | | | |
| | GDSYMN | | | | | |
| 73 | KASQSVD | 7209 | KLLIYAASNLES | 7599 | QQSNEDPLT | 6758 |
| | YD- | | | | | |
| | GDSYMN | | | | | |
| 74 | KASQSVD | 7210 | KLLIYAASNLES | 7600 | QQSNKDPFT | 6759 |
| | YD- | | | | | |
| | GDSYMN | | | | | |
| 75 | KASQSVD | 7211 | KLLIYAASNLES | 7601 | QQSNKDPFT | 6760 |
| | YD- | | | | | |
| | GDSYMN | | | | | |
| 76 | KASQSVD | 7212 | KLLIYAASNLES | 7602 | QQSNKDPFT | 6761 |
| | YD- | | | | | |
| | GDSYMN | | | | | |
| 149 | RASQSVST | 5742 | KLLIKYASNLES | 7603 | QHSWEIPLT | 6762 |
| | SSYSYMH | | | | | |
| 150 | RASQSVST | 5743 | KLLIKYASNLES | 7604 | QHSWEIPLT | 6763 |
| | SSYSYMH | | | | | |
| 26 | RASQSVST | 5744 | KLLIKYASNLES | 7605 | QHSWEIPLT | 6764 |
| | SSYSYMH | | | | | |
| 77 | RASQSVST | 7213 | KLLIKYASNLES | 7606 | QHSWEIPLT | 6765 |
| | SSYSYMH | | | | | |
| 78 | RASQSVST | 7214 | KLLIKYASNLES | 7607 | QHSWEIPLT | 6766 |
| | SSYSYMH | | | | | |
| 79 | RASQSVST | 7215 | KLLIKYASNLES | 7608 | QHSWEIPLT | 6767 |
| | SSYSYMH | | | | | |
| 151 | RASQDISN | 5748 | KLLIYSTSRLHS | 7609 | QQGNTLPWT | 6768 |
| | YLN | | | | | |
| 152 | RASQDISN | 5749 | KLLIYSTSRLHS | 7610 | QQGNALPWT | 6769 |
| | YLN | | | | | |
| 153 | RASQDISN | 5750 | KLLIYSTSRLHS | 7611 | QQGNTLPWT | 6770 |
| | YLN | | | | | |
| 154 | RSST- | 5751 | TGLIGGTSNRAP | 7612 | ALWYSTHYV | 6771 |
| | GAVTTSN | | | | | |
| | YAN | | | | | |
| 155 | RSST- | 5752 | TGLIGGTSNRAP | 7613 | ALWYSTHYV | 6772 |
| | GAVTTSN | | | | | |
| | YAN | | | | | |
| 156 | RSST- | 5753 | TGLIGGTSNRAP | 7614 | ALWYSTHYV | 6773 |
| | GAVTTSN | | | | | |
| | YAN | | | | | |
| 80 | RSST- | 7216 | TGLIGGTSNRAP | 7615 | ALWYSTHYV | 6774 |
| | GAVTTSN | | | | | |
| | YAN | | | | | |
| 81 | RSST- | 7217 | TGLIGGTSNRAP | 7616 | ALWYSTHYV | 6775 |
| | GAVTTSN | | | | | |
| | YAN | | | | | |
| 82 | RSST- | 7218 | TGLIGGTSNRAP | 7617 | ALWYSTHYV | 6776 |
| | GAVTTSN | | | | | |
| | YAN | | | | | |
| 17 | RASENIYS | 5757 | QLLVYAATNLAD | 7618 | QHFWGTPWT | 6777 |
| | NLA | | | | | |
| 157 | IT- | 5758 | KLLISEGNTLRP | 7619 | LQSDNMPFT | 6778 |
| | STDIDDD | | | | | |
| | MN | | | | | |
| 27 | MTSIDIDD | 5759 | KLLISEGNTLRP | 7620 | LQSDNMPFT | 6779 |
| | DMN | | | | | |
| 158 | RSST- | 5760 | TGLIGGTSNRAP | 7621 | ALWYSTHY | 7771 |
| | GAVTTSN | | | | | |
| | YAN | | | | | |
| 159 | KASQSVD | 5761 | KLLIYAASNLES | 7622 | QQSNEDPLT | 6781 |
| | YD- | | | | | |
| | GDSYMN | | | | | |
| 83 | KASQSVD | 7219 | KLLIYAASNLES | 7623 | QQSNEDPLT | 6782 |
| | YD- | | | | | |
| | GDSYMN | | | | | |
| 160 | KSS- | 5763 | KLLIYWASTRES | 7624 | QQYYSYPPWT | 7772 |
| | QSLLYSTN | | | | | |
| | QKNYLA | | | | | |
| 28 | RSST- | 5764 | TGLIGGTSNRAP | 7625 | ALWYSTHWV | 6784 |
| | GAVTTSN | | | | | |
| | YAN | | | | | |
| 84 | RSST- | 7220 | TGLIGGTSNRAP | 7626 | ALWYSTHWV | 6785 |
| | GAVTTSN | | | | | |
| | YAN | | | | | |
| 29 | RSST- | 5766 | TGLIGGTNNRAP | 7627 | ALWYSNHL | 7773 |
| | GAVTTSN | | | | | |
| | YAN | | | | | |
| 161 | KASQSVD | 5767 | KLLIYAASNLES | 7628 | QQSNEDPPT | 6787 |
| | YD- | | | | | |
| | GDSYMN | | | | | |
| 30 | RSST- | 5768 | TGLIGGTNNRAP | 7629 | ALWYSNHWV | 6788 |
| | GAVTTSN | | | | | |
| | YAN | | | | | |
| 162 | RASENIYY | 5769 | QLLIYNANSLED | 7630 | KQAYDVPYT | 6789 |
| | SLA | | | | | |
| 18 | KSS- | 5770 | KLLVYFASTRES | 7631 | QQHYSTPLT | 6790 |
| | QSLLNSSN | | | | | |
| | QKNYLA | | | | | |
| 85 | KSS- | 7221 | KLLVYFASTRES | 7632 | QQHYSTPLT | 6791 |
| | QSLLNSSN | | | | | |
| | QKNYLA | | | | | |
| 163 | RASQDISN | 5772 | KLLIYYTSRLHS | 7633 | QQDNTLPRT | 6792 |
| | YLN | | | | | |
| 86 | RASQDISN | 7222 | KLLIYYTSRLHS | 7634 | QQDNTLPRT | 6793 |
| | YLN | | | | | |
| 164 | RASQDISN | 5774 | KLLIYYTSRLHS | 7635 | QQGNTLPWT | 6794 |
| | YLN | | | | | |
| 165 | RASENIYS | 5775 | QLLVYAATNLAD | 7636 | QHFWGTPWT | 6795 |
| | NLA | | | | | |
| 31 | QATQDIV- | 5776 | SFLIYYATELAE | 7637 | LQFYEFPYT | 6796 |
| | KNLN | | | | | |
| 87 | QATQDIV- | 7223 | SFLIYYATELAE | 7638 | LQFYEFPYT | 6797 |
| | KNLN | | | | | |
| 32 | SASSSVSY | 5778 | RLLIYDTSNLAS | 7639 | QQWSSYPLT | 6798 |
| | MY | | | | | |
| 166 | KASQSVD | 5779 | KLLIYAASNLES | 7640 | QQSNEDPWT | 6799 |
| | YD- | | | | | |
| | GDSYMN | | | | | |
| 88 | KASQSVD | 7224 | KLLIYAASNLES | 7641 | QQSNEDPWT | 6800 |
| | YD- | | | | | |
| | GDSYMN | | | | | |
| 167 | RSST- | 5781 | TGLIGGTNNRAP | 7642 | ALWYSNHWV | 6801 |
| | GAVTTSN | | | | | |
| | YAN | | | | | |
| 168 | QATQDIV- | 5782 | SFLIYYATELAE | 7643 | LQFYEFPLT | 6802 |
| | KNLN | | | | | |
| 89 | QATQDIV- | 7225 | SFLIYYATELAE | 7644 | LQFYEFPLT | 6803 |
| | KNLN | | | | | |
| 169 | TLSSQHST | 7226 | KYVMELKKDGSH | 7645 | GVGDTIKEQFVFV | 7774 |
| | YTIE | | STGD | | | |
| 170 | KASQSVD | 5785 | KLLIYAASNLES | 7646 | QQSNEDPPT | 6805 |
| | YD- | | | | | |
| | GDSYMN | | | | | |
| 171 | RASQDIGI | 5786 | KRLIYATSSLDS | 7647 | LQYASSPYT | 6806 |
| | SLN | | | | | |
| 172 | RASENIYS | 7227 | QLLVYNAKNLAD | 7648 | QHFWGTPYT | 6807 |
| | YLA | | | | | |
| 19 | SASSSVSY | 5788 | KLWIYSTSNLAS | 7649 | QQRSSFPYT | 6808 |
| | MH | | | | | |
| 90 | SASSSVSY | 7228 | KLWIYSTSNLAS | 7650 | QQRSSFPYT | 6809 |
| | MH | | | | | |
| 173 | KASQDIN- | 5790 | KTLIYRANRLVD | 7651 | LQYDEFPLT | 6810 |
| | SYLS | | | | | |
| 91 | KASQDIN- | 7229 | KTLIYRANRLVD | 7652 | LQYDEFPLT | 6811 |
| | SYLS | | | | | |
| 174 | RASQDIH | 5792 | KHLIYETSNLDS | 7653 | LQYASSPLT | 6812 |
| | GYLN | | | | | |
| 92 | RASQDIH | 7230 | KHLIYETSNLDS | 7654 | LQYASSPLT | 6813 |
| | GYLN | | | | | |
| 175 | KASQDVG | 5794 | KLLIYWASTRHT | 7655 | QQYSSYPFT | 6814 |
| | TAVA | | | | | |
| 93 | KASQDVG | 7231 | KLLIYWASTRHT | 7656 | QQYSSYPFT | 6815 |
| | TAVA | | | | | |
| 20 | KASQSVS | 5796 | KLLIYYASNRYT | 7657 | QQDYTSLPT | 6816 |
| | NDVA | | | | | |
| 94 | KASQSVS | 7232 | KLLIYYASNRYT | 7658 | QQDYTSLPT | 6817 |
| | NDVA | | | | | |
| 176 | RSST- | 5798 | TGLIGGTNNRAP | 7659 | ALWYSNHLV | 6818 |
| | GAVTTSN | | | | | |
| | YAN | | | | | |
| 177 | KASQSVD | 5799 | KLLIYVASNLES | 7660 | QQSHEDPRT | 6819 |
| | YD- | | | | | |
| | GDSYMN | | | | | |
| 178 | SASSSVSY | 5800 | KLWIYDTSKLAS | 7661 | FQGSGYPLT | 6820 |
| | MH | | | | | |
| 33 | IT- | 5801 | KLLISEGNTLRP | 7662 | LQSDNMPLM | 6821 |
| | STDIDDD | | | | | |
| | MN | | | | | |
| 179 | RASENIYS | 5802 | QLLVYAATNLAD | 7663 | QHFWGTPYT | 6822 |
| | NLA | | | | | |
| 34 | SASSSVSY | 5803 | KLWIYSTSNLAS | 7664 | QQRSTYPT | 7775 |
| | MH | | | | | |
| 180 | IT- | 5804 | KLLISEGNTLRP | 7665 | LQSDNMPLT | 6824 |
| | STDIDDD | | | | | |
| | MN | | | | | |
| 95 | IT- | 7233 | KLLISEGNTLRP | 7666 | LQSDNMPLT | 6825 |
| | STDIDDD | | | | | |
| | MN | | | | | |
| 181 | RASQDISN | 5806 | KLLIYYTSRLHS | 7667 | QQGNTLPFT | 6826 |
| | YLN | | | | | |
| 96 | RASQDISN | 7234 | KLLIYYTSRLHS | 7668 | QQGNTLPFT | 6827 |
| | YLN | | | | | |
| 182 | SAS- | 5808 | KLLIYYTSSLHS | 7669 | QQYSKLPYT | 6828 |
| | QGISNYLN | | | | | |
| 97 | SAS- | 7235 | KLLIYYTSSLHS | 7670 | QQYSKLPYT | 6829 |
| | QGISNYLN | | | | | |
| 183 | RASQSISD | 5810 | RLLIKYASQSIS | 7671 | QNGHSFPWT | 6830 |
| | YLH | | | | | |
| 98 | RASQSISD | 7236 | RLLIKYASQSIS | 7672 | QNGHSFPWT | 6831 |
| | YLH | | | | | |
| 35 | QATQDIV- | 5812 | SFLIYYATELAE | 7673 | LQFYEFPYT | 6832 |
| | KNLN | | | | | |
| 99 | QATQDIV- | 7237 | SFLIYYATELAE | 7674 | LQFYEFPYT | 6833 |
| | KNLN | | | | | |
| 100 | QATQDIV- | 7238 | SFLIYYATELAE | 7675 | LQFYEFPYT | 6834 |
| | KNLN | | | | | |
| 36 | RASGNIH | 5815 | QLLVYNAKTLAD | 7676 | QHFWSTPWT | 6835 |
| | NYLA | | | | | |
| 101 | RASGNIH | 7239 | QLLVYNAKTLAD | 7677 | QHFWSTPWT | 6836 |
| | NYLA | | | | | |
| 184 | RSST- | 5817 | TGLIGGTSYRAP | 7678 | ALWYSTHYV | 6837 |
| | GAVTTSN | | | | | |
| | YAN | | | | | |
| 102 | RSST- | 7240 | TGLIGGTSYRAP | 7679 | ALWYSTHYV | 6838 |
| | GAVTTSN | | | | | |
| | YAN | | | | | |
| 185 | RASQEIS- | 5819 | KRLIYAASTLDS | 7680 | LQYASYPWT | 6839 |
| | GYLS | | | | | |
| 103 | RASQEIS- | 7241 | KRLIYAASTLDS | 7681 | LQYASYPWT | 6840 |
| | GYLS | | | | | |
| 186 | KASQSVD | 5821 | KLLIYAASNLES | 7682 | QQSNEDPLPT | 7776 |
| | YD- | | | | | |
| | GDSYMN | | | | | |
| 21 | HASQNIN | 5822 | KLLIYKASNLHT | 7683 | QQGQSYPLT | 6842 |
| | VWLS | | | | | |
| 187 | SASSSVSY | 5823 | KRWIYDTSKLAS | 7684 | QQWSSNPLT | 6843 |
| | MH | | | | | |
| 188 | RASGNIH | 5824 | QLLVYNAKTLAD | 7685 | QHFWSTPWT | 6844 |
| | NYLA | | | | | |
| 189 | RASENIYS | 5825 | QLLVYNAKTLAE | 7686 | QHHYGTPFT | 6845 |
| | YLA | | | | | |
| 190 | RAS- | 5826 | KLWIYYTSNLAP | 7687 | QQFTSSLT | 7777 |
| | SSVNYMY | | | | | |
| 191 | RSST- | 5827 | TGLIGSTNNRAP | 7688 | TLWYSNHWV | 6847 |
| | GAVTTSN | | | | | |
| | YAN | | | | | |
| 192 | KASQDVG | 5828 | KLLIYWASTRHT | 7689 | QQYSSYPFT | 6848 |
| | TAVA | | | | | |
| 193 | KASQDIN- | 5829 | KTLIYRANRLVD | 7690 | LQYDEFPPT | 6849 |
| | SYLS | | | | | |
| 194 | RASENIYS | 5830 | QLLVYAATNLAD | 7691 | QHFWGTPFT | 6850 |
| | NLA | | | | | |
| 195 | RASQSISD | 5831 | RLLIKYASQSIS | 7692 | QNGHSFPYT | 6851 |
| | YLH | | | | | |
| 104 | RASQSISD | 7242 | RLLIKYASQSIS | 7693 | QNGHSFPYT | 6852 |
| | YLH | | | | | |
| 37 | RASENIYS | 5833 | QLLVYAATNLAD | 7694 | QHFWGTPYT | 6853 |
| | NLA | | | | | |
| 196 | RSST- | 5834 | TGLIGGTNNRAP | 7695 | ALWYSNHWV | 6854 |
| | GAVTTSN | | | | | |
| | YAN | | | | | |
| 197 | IT- | 5835 | KLLISEGNTLRP | 7696 | LQSDNLPLT | 6855 |
| | STDIDDD | | | | | |
| | MN | | | | | |
| 198 | SASSSVSY | 5836 | KLWIYSTSNLAS | 7697 | QQRSSYPPT | 6856 |
| | MH | | | | | |
| 199 | SASSSVSY | 5837 | KRWIYDTSKLAS | 7698 | QQWSSNPLT | 6857 |
| | MH | | | | | |
| 22 | IT- | 5838 | KLLISEGNSLRP | 7699 | LQSDNLPLT | 6858 |
| | STDIDDD | | | | | |
| | MN | | | | | |
| 200 | SASSSVSS | 5839 | KLWIYSTSNLAS | 7700 | HQWSSYPPT | 6859 |
| | SYLY | | | | | |
| 201 | TLSSQHST | 7243 | KYVMELKKDGSH | 7701 | GVGDTIKEQFVYV | 7778 |
| | YTIE | | STGD | | | |
| 202 | RSSQSIVH | 5841 | KLLIYKVSNRFS | 7702 | FQGSHVPWT | 6861 |
| | SNGNTYLE | | | | | |
| 203 | KASQDIN- | 5842 | KTLIYRANRLVD | 7703 | LQYDEFPPT | 6862 |
| | SYLS | | | | | |
| 204 | KSS- | 5843 | KRLIYLVSKLDS | 7704 | WQGTHFPWT | 6863 |
| | QSLLDSDG | | | | | |
| | KTYLN | | | | | |
| 205 | SASSSVSS | 5844 | KLWIYSTSNLAS | 7705 | HQWSSYPPT | 6864 |
| | SYLY | | | | | |
| 206 | RSSQSIVY | 5845 | KLLIYKVSNRFS | 7706 | FQGSHVPPT | 6865 |
| | SNGNTYLE | | | | | |
| 207 | RASENI- | 5846 | QLLVYAATNLAD | 7707 | QHFWGTPWT | 6866 |
| | YNNLA | | | | | |
| 208 | SASSSVSS | 5847 | KLWIYSTSNLAS | 7708 | HQWSSYPPT | 6867 |
| | SYLY | | | | | |
| 209 | SASSSVSY | 5848 | RLLIYDTSNLAS | 7709 | QQWSTYPPIT | 7779 |
| | MY | | | | | |
| 210 | SASSSVSY | 5849 | RLLIYDTSNLAS | 7710 | QQWSSYPFT | 6869 |
| | MY | | | | | |
| 211 | RAS- | 5850 | KPWIYATSNLAS | 7711 | QQWSSNPYT | 6870 |
| | SSVSYMH | | | | | |
| 212 | RASENIYS | 5851 | QLLVYAATNLAD | 7712 | QHFWGTPWT | 6871 |
| | NLA | | | | | |
| 213 | KASQDVS | 5852 | KLLIYWASTRHT | 7713 | QQHYSTPWT | 6872 |
| | TAVA | | | | | |
| 214 | KSS- | 5853 | KRLIYLVSKLDS | 7714 | WQGTHFPWT | 6873 |
| | QSLLDSDG | | | | | |
| | KTYLN | | | | | |
| 215 | RSSQSIVH | 5854 | KFLIYKVSNRFS | 7715 | FQGSHVPPT | 6874 |
| | SNGNTYLE | | | | | |
| 216 | IT- | 5855 | KLLISEGNTLRP | 7716 | LQSDNMPLT | 6875 |
| | STDIDDD | | | | | |
| | MN | | | | | |
| 217 | KASQDINK | 5856 | RLLIHYTSTLQP | 7717 | LQYDNLYMYT | 7780 |
| | YIA | | | | | |
| 218 | HASQNIN | 5857 | KLLIYKASNLHT | 7718 | QQGQSYPYT | 6877 |
| | VWLS | | | | | |
| 219 | SASSSVSY | 5858 | KPWIYLTSNLAS | 7719 | QQWSSNPPT | 6878 |
| | MY | | | | | |
| 220 | KSS- | 5859 | KRLIYLVSKLDS | 7720 | WQGTHFPWT | 6879 |
| | QSLLDSDG | | | | | |
| | KTYLN | | | | | |
| 221 | SASLSVSD | 5860 | RLLIYDTSNLAS | 7721 | QQWSSYPFT | 6880 |
| | MY | | | | | |
| 222 | SASSSVSS | 5861 | KLWIYSTSNLAS | 7722 | HQWSSYPPT | 6881 |
| | SYLY | | | | | |
| 223 | RAS- | 5862 | KLWIYYTSNLAP | 7723 | QQFTSSPST | 6882 |
| | SSVNYMY | | | | | |
| 105 | RAS- | 7244 | KLWIYYTSNLAP | 7724 | QQFTSSPST | 6883 |
| | SSVNYMY | | | | | |
| 224 | IT- | 5864 | KLLISEGNTLRP | 7725 | LQSDNLPLT | 6884 |
| | NTDIDDD | | | | | |
| | MN | | | | | |
| 106 | IT- | 7245 | KLLISEGNTLRP | 7726 | LQSDNLPLT | 6885 |
| | NTDIDDD | | | | | |
| | MN | | | | | |
| 225 | KASQSVD | 5866 | KLLIYAASNLES | 7727 | QQSNEDPWT | 6886 |
| | YD- | | | | | |
| | GDSYMN | | | | | |
| 226 | RASQSISN | 5867 | RLLIKYASQSIS | 7728 | QQSNSWPFT | 6887 |
| | NLH | | | | | |
| 227 | SASSSVSS | 5868 | KLWIYSTSNLAS | 7729 | HQWSSYPPT | 6888 |
| | SYLY | | | | | |
| 228 | IT- | 5869 | KLLISEGNTLRP | 7730 | LQSDNMPLT | 6889 |
| | STDIDDD | | | | | |
| | MN | | | | | |
| 229 | KSS- | 5870 | KRLIYLVSKLDS | 7731 | WQGTHFPWT | 6890 |
| | QSLLDSDG | | | | | |
| | KTYLH | | | | | |
| 230 | KASQDINK | 5871 | RLLIHYTSTLQP | 7732 | LQYDNLRT | 7781 |
| | YIA | | | | | |
| 231 | RSST- | 5872 | TGLIVGTNNRAP | 7733 | VLWYSNHLV | 6892 |
| | GAVTTSN | | | | | |
| | YAN | | | | | |
| 232 | KASEN- | 5873 | KLLIYGASNRYT | 7734 | GQSYSYPPT | 6893 |
| | VGTYVS | | | | | |
| 233 | RASET- | 5874 | KLLIYRASNLES | 7735 | QQSNEDPRT | 6894 |
| | VDSYGYSF | | | | | |
| | MH | | | | | |
| 234 | KSS- | 5875 | KLLLYWASTRES | 7736 | QQYYSYRT | 7782 |
| | QSLLYSTN | | | | | |
| | QKNYLA | | | | | |
| 235 | KSS- | 5876 | KRLIYLVSKLDS | 7737 | WQGTHFPFT | 6896 |
| | QSLLDSDG | | | | | |
| | KTYLN | | | | | |
| 236 | KASQSVD | 5877 | KLLIYAASNLES | 7738 | QQSNEDPFT | 6897 |
| | YD- | | | | | |
| | GDSYMN | | | | | |
| 237 | TLSSQHST | 7246 | KYVMELKKDGSH | 7739 | GVGDTIKEQFVYV | 7783 |
| | YTIE | | STGD | | | |
| 107 | TLSSQHST | 7247 | KYVMELKKDGSH | 7740 | GVGDTIKEQFVYV | 6899 |
| | YTIE | | STGD | | | |
| 238 | SASSSVSY | 5880 | KRWIYDTSKLAS | 7741 | QQWSSNPLT | 6900 |
| | MH | | | | | |
| 108 | SASSSVSY | 7248 | KRWIYDTSKLAS | 7742 | QQWSSNPLT | 6901 |
| | MH | | | | | |
| 239 | QATQDIV- | 5882 | SFLIYYATELAE | 7743 | LQFYEFPLT | 6902 |
| | KNLN | | | | | |
| 240 | RAS- | 5883 | KLLIYAASNQGS | 7744 | QQSKEVPPT | 6903 |
| | ESVDNY- | | | | | |
| | GISFMN | | | | | |
| 241 | RASQSISD | 5884 | RLLIKYASQSIS | 7745 | QNGHSFPLT | 6904 |
| | YLH | | | | | |
| 242 | RSSQSIVH | 5885 | KLLIYKVSNRFS | 7746 | FQGSHVPLT | 6905 |
| | SNGDTYLE | | | | | |
| 243 | SASSSVSY | 5886 | KRWIYDTSKLAS | 7747 | QQWSSNPLT | 6906 |
| | MH | | | | | |
| 244 | TASESLYS- | 5887 | KLLIYGASNRYI | 7748 | AQFYSYPYT | 6907 |
| | SKHKVHYL | | | | | |
| | A | | | | | |
| 245 | TLSSQHST | 7249 | KYVMELKKDGSH | 7749 | GVGDTIKEQFVYV | 7784 |
| | YTIE | | STGD | | | |
| 246 | RASQSVST | 5889 | KLLIKYASNLES | 7750 | QHSWEIPLT | 6909 |
| | SSYSYMH | | | | | |
| 247 | SASSSVSY | 5890 | KRWIYDTSKLAS | 7751 | QQWSSNPLT | 6910 |
| | MH | | | | | |
| 248 | KASDHIN | 5891 | RLLISGATSLET | 7752 | QQYWSTPLT | 6911 |
| | NWLA | | | | | |
| 249 | RASENIYS | 5892 | QLLVYNAKTLAE | 7753 | QHHYGTPYT | 6912 |
| | YLA | | | | | |
| 250 | RASENIYS | 5893 | QLLVYNAKTLAE | 7754 | QHHYGTPPT | 6913 |
| | YLA | | | | | |
| 251 | SASSSVSY | 5894 | KRWIYDTSKLAS | 7755 | QQWSSNPPT | 6914 |
| | MH | | | | | |
| 252 | RAS- | 5895 | KLLIYAASNQGS | 7756 | QQSKEVPPT | 6915 |
| | ESVDNY- | | | | | |
| | GISFMN | | | | | |
| 253 | TASESLYS- | 5896 | KLLIYGASNRYI | 7757 | AQFYSYPYT | 6916 |
| | SKHKVHYL | | | | | |
| | A | | | | | |
| 254 | RSST- | 5897 | TGLIGGTSNRAP | 7758 | ALWYSTHYV | 6917 |
| | GAVTTSN | | | | | |
| | YAN | | | | | |
| 255 | SASSSI- | 5898 | KRWIYDTSKLAS | 7759 | HQRSSYPT | 7785 |
| | SYMH | | | | | |
| | HCDR1 | | HCDR2 | | HCDR3 | |
| | | SEQ ID | | SEQ ID | | SEQ ID |
| | Sequence | NO: | Sequence | NO: | Sequence | NO: |
| 265 | GGTFSSY | 10885 | NPSGG | 11147 | ARDLGDPGMDV | 11409 |
| 266 | GGTFSNY | 10886 | DPSGGS | 11148 | ARDLGDMGMDV | 11410 |
| 267 | GGTFSNY | 10887 | NPSGGS | 11149 | ARDVGDRGMDV | 11411 |
| 263 | GGTFSSY | 10888 | NPSGG | 11150 | ARDLGDPGMDV | 11412 |
| 268 | GSTFSGY | 10889 | DPNGGG | 11151 | AKDIVHDGTEYFQH | 11413 |
| 269 | GYTFTSY | 10890 | NPSGGS | 11152 | AKDIVHDGTEYFQH | 11414 |
| 270 | GGTFSSY | 10891 | NPSGGS | 11153 | AREGRDHDAFDI | 11415 |
| 271 | GFTFTDY | 10892 | NPSGGS | 11154 | AREGRSHDAFDI | 11416 |
| 272 | GYTFTGY | 10893 | NPHSGD | 11155 | ARWVGTTEYYYYYYMDV | 11417 |
| 273 | GYTFTDY | 10894 | DPSGGS | 11156 | ATTAYYDFWSGYSMDV | 11418 |
| 274 | GYTFTSH | 10895 | DPSGGS | 11157 | ARDMDNWNTGYYYYMDV | 11419 |
| 275 | GGTFSSY | 10896 | NPNSGD | 11158 | ARDQRGGDAWDV | 11420 |
| 276 | GGTFSNY | 10897 | TPSGGS | 11159 | ARDTAGHFDI | 11421 |
| 277 | GGTFRND | 10898 | NPNSGN | 11160 | ARDNPDLDGMDV | 11422 |
| 278 | GGTFSSY | 10899 | SAYNGN | 11161 | ARDLVGHFDY | 11423 |
| 279 | GGTFSSY | 10900 | NPNSGG | 11162 | ARDGYSGSYSD | 11424 |
| 264 | GGTFSSY | 10901 | NPNSGG | 11163 | ARDGYSGSYSD | 11425 |
| 257 | GGTFSSY | 10902 | NPNSGG | 11164 | ARDGYSGSYSD | 11426 |
| 280 | GNTLSSH | 10903 | NPSGGS | 11165 | ARDQGSSGTFDY | 11427 |
| 281 | GGTLSSY | 10904 | NPNSGG | 11166 | ARDSTDVIDY | 11428 |
| 282 | GYIFTSY | 10905 | NPNSGD | 11167 | ARDGGTVTPTEEYYYYG- | 11429 |
| | | | | | MDV | |
| 283 | GGTFSSY | 10906 | SVYNGN | 11168 | ASLDDLDY | 11430 |
| 284 | GHTFTSY | 10907 | NPNNGG | 11169 | ARDMVRDSAEYFQH | 11431 |
| 285 | GYTFITS | 10908 | NPSGGT | 11170 | ARDSSGYPIDY | 11432 |
| 286 | GYTFTSY | 10909 | IPLSGA | 11171 | ARGALYNWNDGWFDP | 11433 |
| 258 | GYTFTSY | 10910 | IPLSGA | 11172 | ARGALYNWNDGWFDP | 11434 |
| 287 | GFTVGSW | 10911 | WYEGSN | 11173 | ARLGTASLPYFDY | 11435 |
| 288 | GYTFTGY | 10912 | NPNRGD | 11174 | ARESGDGFDP | 11436 |
| 289 | GYTFTNY | 10913 | NPNSGN | 11175 | ARDWPNWFDP | 11437 |
| 290 | GYSFTDN | 10914 | RSDNGE | 11176 | AREVQLVGFDY | 11438 |
| 291 | GYTFSDH | 10915 | IPIFGT | 11177 | ARGSSWYLHFQH | 11439 |
| 260 | GYTFSDH | 10916 | IPIFGT | 11178 | ARGSSWYLHFQH | 11440 |
| 292 | GGTFSSY | 10917 | IPIFGT | 11179 | AKGVDRYNWNDAFDY | 11441 |
| 293 | GYTFTDY | 10918 | HSNSGG | 11180 | ARESSGYDSSLDY | 11442 |
| 294 | GGTFSSY | 10919 | NPNSGD | 11181 | TTDPRLDSSDPGY | 11443 |
| 295 | GGTFGNY | 10920 | SAYNGN | 11182 | ARGGMDV | 11444 |
| 296 | GGTFSRY | 10921 | YPSDGS | 11183 | ARDRLGDLDY | 11445 |
| 261 | GGTFSRY | 10922 | YPSDGS | 11184 | ARDRLGDLDY | 11446 |
| 297 | GGTFSSY | 10923 | NPNSGN | 11185 | ARDSIVGGYPFDY | 11447 |
| 298 | GYTFTSY | 10924 | TPIFGT | 11186 | AREGYSSSWHDDAFDI | 11448 |
| 299 | GGTFSNY | 10925 | DPSGGS | 11187 | ARDLGDYGLDS | 11449 |
| 300 | GYTFTGY | 10926 | NPNSGD | 11188 | ATGGSDSSGYYYEGYFQH | 11450 |
| 301 | GGTFSSY | 10927 | SPNSGN | 11189 | ARDKGGYYDSSGYYWY | 11451 |
| 302 | GFSLSSY | 10928 | SSNGGS | 11190 | ARVGDGDGYNPDFDY | 11452 |
| 303 | GYTFTSY | 10929 | DPTSGA | 11191 | AKDPIVATEVDY | 11453 |
| 304 | GGTFSSY | 10930 | SPNSGN | 11192 | ARDSGAFDI | 11454 |
| 305 | GVTISNY | 10931 | NPNSGN | 11193 | AREGLLDAFDI | 11455 |
| 306 | GGTFSRY | 10932 | NPYDGN | 11194 | ARGGRHHDAFDI | 11456 |
| 307 | GGTFSSY | 10933 | NPSGDG | 11195 | ARDISNDAFDI | 11457 |
| 308 | GYILTGH | 10934 | SAYNGD | 11196 | ARGSSWDDAFDI | 11458 |
| 309 | GFTFSNH | 10935 | GAGGG | 11197 | AREGWNDDVFDI | 11459 |
| 310 | GGTFSSY | 10936 | NPSAGT | 11198 | ARDGNFGAFDI | 11460 |
| 311 | GYSFTTY | 10937 | IPIFGT | 11199 | ARDKSGWNYGSGSYN- | 11461 |
| | | | | | DAFDI | |
| 312 | GYAFTGY | 10938 | NPNSGK | 11200 | ARDGGLDFDY | 11462 |
| 313 | GYTFTTY | 10939 | NPNTGD | 11201 | AKDPAVTPDAFDI | 11463 |
| 314 | GGTLSSY | 10940 | DPSGGG | 11202 | AGSLYYYGMDV | 11464 |
| 315 | GGTFGSS | 10941 | IPIFGT | 11203 | AKEDDILPPRAFDI | 11465 |
| 316 | GFTFDDY | 10942 | SGGGGV | 11204 | ARVYSSGWLDAFDI | 11466 |
| 317 | GGTFSSY | 10943 | SGYNGN | 11205 | ASSDVSPDAFDI | 11467 |
| 318 | GGTQNIY | 10944 | NPNSGN | 11206 | ATPTSSSDDAFDI | 11468 |
| 319 | GGTFSSY | 10945 | NPNSGG | 11207 | ARASRGDDAFDI | 11469 |
| 320 | GIPFTSD | 10946 | NPSGGS | 11208 | ARERYEGGY- | 11470 |
| | | | | | SSGPGNYYYGMDV | |
| 321 | GGTFSNY | 10947 | NPNSGN | 11209 | ARDDDYGDYPV | 11471 |
| 322 | GDTFSDH | 10948 | NPKIGN | 11210 | VYDSSGYDAFDI | 11472 |
| 323 | GYTFTSY | 10949 | NPGTGG | 11211 | ARETPSDYYDSSGYYYN- | 11473 |
| | | | | | DAFDI | |
| 324 | GGTFSSY | 10950 | IPSGG | 11212 | ARDLGTTFDI | 11474 |
| 325 | GYTFTAY | 10951 | NPDNDN | 11213 | AKDIAVAALAYGMDV | 11475 |
| 326 | GFTFSSY | 10952 | SYDGSD | 11214 | ARQSLYYYYGMDV | 11476 |
| 327 | GYTFTDY | 10953 | STFTGN | 11215 | ARDAPLAAAGTDYYYG- | 11477 |
| | | | | | MDV | |
| 262 | GYTFTDY | 10954 | STFTGN | 11216 | ARDAPLAAAGTDYYYG- | 11478 |
| | | | | | MDV | |
| 328 | GFTFSSY | 10955 | SDDGIT | 11217 | ARDDSSGYGGMDV | 11479 |
| 329 | GFTFSSY | 10956 | SYDGGD | 11218 | ASGSLVLGYYYMDV | 11480 |
| 330 | GYTFTNY | 10957 | NPNTGG | 11219 | ATGGGGSYYDAFDV | 11481 |
| 331 | GGTFSSY | 10958 | NPNSGN | 11220 | ARDIGEGYSMDV | 11482 |
| 332 | GFTFSNH | 10959 | SYDGSN | 11221 | AREEKYSSSWY- | 11483 |
| | | | | | VGVDAFDI | |
| 333 | GFTFSSS | 10960 | SGSGDN | 11222 | ARDQEDYYYDSSGYG- | 11484 |
| | | | | | MDV | |
| 334 | GGTFSSH | 10961 | IPIFGT | 11223 | AKGDW- | 11485 |
| | | | | | GIVVVPAAIGAFDI | |
| 335 | GYTFTAY | 10962 | SPVFGS | 11224 | ARDLGYYDSSGYRYDAF | 11486 |
| | | | | | DI | |
| 336 | GYTFTSY | 10963 | SPMFGT | 11225 | AKDGWYYGMDV | 11487 |
| 337 | GGTFSSY | 10964 | NPNSGG | 11226 | ARGEAGNLDWYFDL | 11488 |
| 338 | GGTFSNY | 10965 | NPNNGD | 11227 | AREDVWYFDL | 11489 |
| 339 | GYTFTTY | 10966 | STYDGK | 11228 | ALHLGGDWYFDL | 11490 |
| 340 | GYTFTGY | 10967 | NPNTGA | 11229 | ARQHGDYDWYFDL | 11491 |
| 341 | GDTFTTY | 10968 | NPNSGN | 11230 | ARDSGRH | 11492 |
| 342 | GGTFSSY | 10969 | IPMLGI | 11231 | VREEVAGANWFDP | 11493 |
| 343 | GYTFTSY | 10970 | NPSGGS | 11232 | AREGDYGSGEFDY | 11494 |
| 344 | GYTFTSS | 10971 | NPRSGN | 11233 | ARERDDYGDYGWLDY | 11495 |
| 345 | GYTFTGY | 10972 | NPSGGS | 11234 | ARDLYDSSGY- | 11496 |
| | | | | | WHYYYYMDV | |
| 346 | GGTFSSY | 10973 | NPNSGG | 11235 | ARFSGYDYVDY | 11497 |
| 347 | GGTFSSY | 10974 | NPNGGN | 11236 | ARDVGEDFDL | 11498 |
| 348 | GYTFTSY | 10975 | NPADGD | 11237 | ARDFDWLFAMDV | 11499 |
| 349 | GGTFSNY | 10976 | NPNGGT | 11238 | AKHGDHGFYV | 11500 |
| 350 | GGTFSSY | 10977 | NPNVGS | 11239 | AREDSGTSWFDP | 11501 |
| 351 | GYTFTSY | 10978 | NPSDGS | 11240 | ARDDRGSNYYYGMDV | 11502 |
| 352 | GYTFTAY | 10979 | NPNSGT | 11241 | ARDSSDYYGDYRADAFDI | 11503 |
| 353 | GYTFTSY | 10980 | SPSGDA | 11242 | VKGLDH | 11504 |
| 354 | GFSFSDY | 10981 | GGIGDS | 11243 | ARMNYGDSNYYYYYG- | 11505 |
| | | | | | MDV | |
| 355 | GYTFTSY | 10982 | SPSDGS | 11244 | ARGAVGFDY | 11506 |
| 356 | GYTFTSY | 10983 | NTYSGY | 11245 | TTDDFLSFGY | 11507 |
| 357 | GYMFTDY | 10984 | IPYFGT | 11246 | ARSISGSYVLDAFDI | 11508 |
| 358 | GYTFNSY | 10985 | IPIFGT | 11247 | ARDWGYGDYADDAFDI | 11509 |
| 359 | GGTFSNN | 10986 | NPIYGS | 11248 | AADWRGFDY | 11510 |
| 360 | GYTFTEY | 10987 | NPHNGD | 11249 | AREGDYLGYPIDC | 11511 |
| 361 | GFTFSDY | 10988 | WQDGNV | 11250 | ARDGNSGYVF | 11512 |
| 362 | GYTFTTY | 10989 | NPNTGD | 11251 | ARTAEAVAGLPAFDY | 11513 |
| 363 | GGTSNNY | 10990 | IPLFGT | 11252 | ARVTLYGDYDY | 11514 |
| 364 | GYSLITH | 10991 | NPSDGV | 11253 | AREYYGEGFDY | 11515 |
| 259 | GYSLITH | 10992 | NPSDGV | 11254 | AREYYGEGFDY | 11516 |
| 365 | GGTFSSY | 10993 | NPSGGS | 11255 | ARDLGDTAMDG | 11517 |
| 366 | GYTFTSY | 10994 | TPSGGS | 11256 | ARDGGLASFDY | 11518 |
| 367 | GGTFSSY | 10995 | NPNSGN | 11257 | ARGGGWAMTDAFDI | 11519 |
| 368 | GFTFDDY | 10996 | YSGGD | 11258 | TRKEYYYDSSGYLRLFDY | 11520 |
| 369 | GYTFTDY | 10997 | NPIFGT | 11259 | ARDISGYDYYYYGMDV | 11521 |
| 370 | GGTLNNY | 10998 | DPSDGT | 11260 | ARSDYDFWSGLGGYFDY | 11522 |
| 371 | GGTFSSY | 10999 | DPNSGG | 11261 | ARDSAEWELGGSFDY | 11523 |
| 372 | GFTFSNH | 11000 | GVNGD | 11262 | AREGLVFSGRGHWYFDL | 11524 |
| 373 | GGTFSNY | 11001 | NPNGGN | 11263 | ARDYEDADFDG | 11525 |
| 374 | GYTFSDH | 11002 | NPDSGN | 11264 | ARDSTSGVDY | 11526 |
| 375 | GFTFSSY | 11003 | SYDGHD | 11265 | ARGEQQLEGFYYYYG- | 11527 |
| | | | | | MDV | |
| 376 | GFTFSSY | 11004 | SYDGSK | 11266 | ASDYGDYGTYDY | 11528 |
| 377 | GFTFSSY | 11005 | SGGGDD | 11267 | AREPLAYCGG- | 11529 |
| | | | | | DCPGGFDY | |
| 378 | GFTFSDH | 11006 | GTGGD | 11268 | ARHEDTAIFLDY | 11530 |
| 379 | GYTFTSY | 11007 | SPSDGS | 11269 | ARDGYDAWSYGMDV | 11531 |
| 380 | GYTFTGY | 11008 | NPNSGN | 11270 | ARDGVTGTDY | 11532 |
| 381 | GFAFSSY | 11009 | SGAGDS | 11271 | AREPTTVTDDWYFDL | 11533 |
| 382 | GFAFSSH | 11010 | SGNGDN | 11272 | ARDRAPEYFDL | 11534 |
| 383 | GGTFSSY | 11011 | NPNSGG | 11273 | ARDDYGDYGGGMDV | 11535 |
| 384 | GYTFTDY | 11012 | NPNSGH | 11274 | AKDTSPRYGDGFFDY | 11536 |
| 385 | GFTFSSY | 11013 | SYDGSN | 11275 | ARESGFSAEYFQH | 11537 |
| 386 | GGTFSSY | 11014 | NPSGGS | 11276 | ARATGLYCSGSCFDY | 11538 |
| 388 | RSILDFN | 14119 | ARAGA | 14120 | RVFDLPNDY | 14121 |
| | LCDR1 | | LCDR2 | | LCDR3 | |
| | | SEQ ID | | SEQ ID | | SEQ ID |
| | Sequence | NO: | Sequence | NO: | Sequence | NO: |
| 265 | RASQDISN | 12194 | KLLIYDASNLET | 13104 | QQSYSTPLT | 12714 |
| | YLN | | | | | |
| 266 | RASQSIS- | 12195 | KLLIYAASSLQS | 13105 | QQSYSTPLT | 12715 |
| | SYLN | | | | | |
| 267 | QASQDIS | 12196 | KLLIYKASSLET | 13106 | QQSFSSPLT | 12716 |
| | NYLN | | | | | |
| 263 | RASQDISN | 12197 | KLLIYDASNLET | 13107 | QQSYSTPLT | 12717 |
| | YLN | | | | | |
| 268 | RASQNVN | 12198 | KLLIYEASSLQS | 13108 | QQANSFPFT | 12718 |
| | TWLA | | | | | |
| 269 | RASQSISD | 12199 | KLLIYAASSLQS | 13109 | AQHNHYPYT | 12719 |
| | WLA | | | | | |
| 270 | KSS- | 12200 | KLLIYWASTRES | 13110 | QQYYTTPFT | 12720 |
| | QSVLSSSY | | | | | |
| | NKNYLA | | | | | |
| 271 | KSS- | 12201 | KLLIYWASTRAS | 13111 | QQYYSTPFT | 12721 |
| | QSVLSSSY | | | | | |
| | NKNYLA | | | | | |
| 272 | RAS- | 12202 | KLLIYDASHLEA | 13112 | QQANSFPIT | 12722 |
| | QAIRDDLG | | | | | |
| 273 | RASQGVG | 12203 | KLLIYAASTLQT | 13113 | QQASSFPLT | 12723 |
| | NDLA | | | | | |
| 274 | RASQI- | 12204 | KLLIYAASSLQS | 13114 | QQSYTFPVT | 12724 |
| | IGTNLA | | | | | |
| 275 | RASQSIST- | 12205 | KLLIYDASSLES | 13115 | QQSYSTPFT | 12725 |
| | WLA | | | | | |
| 276 | KSS- | 12206 | KLLIYWASTRES | 13116 | QQYYGSPLT | 12726 |
| | QSVLSSS- | | | | | |
| | NNKNYLA | | | | | |
| 277 | KSS- | 12207 | KLLIYWASTRES | 13117 | QQYYSSPPT | 12727 |
| | QSVLSSSY | | | | | |
| | NKNYLA | | | | | |
| 278 | KSS- | 12208 | KLLIYWASTRES | 13118 | QQYYSSPPT | 12728 |
| | QSVLSSSY | | | | | |
| | NKNYLA | | | | | |
| 279 | KSS- | 12209 | KLLIYWASTRES | 13119 | QQYYSTPWT | 12729 |
| | QSVLSSSY | | | | | |
| | NKNYLA | | | | | |
| 264 | KSS- | 12210 | KLLIYWASTRES | 13120 | QQYYSTPWT | 12730 |
| | QSVLSSSY | | | | | |
| | NKNYLA | | | | | |
| 257 | KSS- | 12211 | KLLIYWASTRES | 13121 | QQYYSTPWT | 12731 |
| | QSVLSSSY | | | | | |
| | NKNYLA | | | | | |
| 280 | KSS- | 12212 | KLLIYWASTRAS | 13122 | QQYYGSPPT | 12732 |
| | QSVLSSSY | | | | | |
| | NKNYLA | | | | | |
| 281 | QASQDIR | 12213 | KLLIYDASTLQS | 13123 | QQAYSFPWT | 12733 |
| | NYLN | | | | | |
| 282 | QASQDIS | 12214 | KLLIYNASNLET | 13124 | QQLNSYPFT | 12734 |
| | NYLN | | | | | |
| 283 | QASQSIST | 12215 | KLLIYAASTLRS | 13125 | LQHYTYPLT | 12735 |
| | WLA | | | | | |
| 284 | RASEDI- | 12216 | KLLIYAASTLQS | 13126 | QQSHTIPWT | 12736 |
| | STYLA | | | | | |
| 285 | RASH- | 12217 | KLLIYAASTLQS | 13127 | QQSYSSPYT | 12737 |
| | HISDFLN | | | | | |
| 286 | RASQDIG | 12218 | KLLIYDASSLQS | 13128 | QQANSFPLT | 12738 |
| | DYLA | | | | | |
| 258 | RASQDIG | 12219 | KLLIYDASSLQS | 13129 | QQANSFPLT | 12739 |
| | DYLA | | | | | |
| 287 | RASQDIRS | 12220 | KLLIYAASSLQS | 13130 | QQSYTAPPT | 12740 |
| | YLA | | | | | |
| 288 | RASQDIS- | 12221 | KLLIYAASTLQS | 13131 | LQHNTYPLT | 12741 |
| | NNLN | | | | | |
| 289 | RASQDIS- | 12222 | KLLIYDASSLQS | 13132 | QQAISFPLT | 12742 |
| | NWLA | | | | | |
| 290 | RASQGIA | 12223 | KLLIYAASSLQS | 13133 | QQADSFPLT | 12743 |
| | NYLA | | | | | |
| 291 | RASQGIAS | 12224 | KLLIYAASTLQP | 13134 | QQFDSYPIT | 12744 |
| | YLA | | | | | |
| 260 | RASQGIAS | 12225 | KLLIYAASTLQP | 13135 | QQFDSYPIT | 12745 |
| | YLA | | | | | |
| 292 | RASQGISN | 12226 | KLLIYAASRLQS | 13136 | QQSSIIPFT | 12746 |
| | YLA | | | | | |
| 293 | RASQGISN | 12227 | KLLIYAASTLQS | 13137 | QQAYSFPYT | 12747 |
| | YLA | | | | | |
| 294 | RASQSIGR | 12228 | KLLIYDASNLET | 13138 | QQSYSTPRT | 12748 |
| | WLA | | | | | |
| 295 | RASQSINS | 12229 | KLLIYDTSSLQS | 13139 | QQTYSTPYT | 12749 |
| | WLA | | | | | |
| 296 | RASQSISS | 12230 | KLLIYAASTLQS | 13140 | QQGYSTPYI | 12750 |
| | WLA | | | | | |
| 261 | RASQSISS | 12231 | KLLIYAASTLQS | 13141 | QQGYSTPYI | 12751 |
| | WLA | | | | | |
| 297 | RASQSIS- | 12232 | KLLIYAASSLQS | 13142 | QQTDSIPIT | 12752 |
| | SYLN | | | | | |
| 298 | RASQSIS- | 12233 | KLLIYAASTLQS | 13143 | QQSYSIPYT | 12753 |
| | SYLN | | | | | |
| 299 | RASQTIRS | 12234 | KLLIYKASSLES | 13144 | QQTYTIPIT | 12754 |
| | YLN | | | | | |
| 300 | RASQTISN | 12235 | KLLIYAASTLQS | 13145 | QQANSFPPT | 12755 |
| | WLA | | | | | |
| 301 | RASQYIGS | 12236 | KLLIYDASNLET | 13146 | QQVDSYPLT | 12756 |
| | YLN | | | | | |
| 302 | RSSQSLLH | 12237 | QLLIYLGSNRAS | 13147 | MQGTHWPPT | 12757 |
| | SNGYNYL | | | | | |
| | D | | | | | |
| 303 | RSSQSLLH | 12238 | QLLIYFGSNRAS | 13148 | MQALQAPVS | 12758 |
| | SNGYNYL | | | | | |
| | D | | | | | |
| 304 | KSS- | 12239 | KLLIYWASSRQS | 13149 | QQYYSTPLT | 12759 |
| | QSVLSSSY | | | | | |
| | NKNYLA | | | | | |
| 305 | KSS- | 12240 | KLLIYWASVRES | 13150 | QQYYSTPIT | 12760 |
| | QSVSSSSY | | | | | |
| | NKNYLA | | | | | |
| 306 | KSTQNVLS | 12241 | KLLIYWASTRES | 13151 | QQYYSTPFT | 12761 |
| | SSNNN- | | | | | |
| | SYLA | | | | | |
| 307 | QASQDIG | 12242 | KLLIYAASSLQS | 13152 | QQTYNTPLT | 12762 |
| | NYLN | | | | | |
| 308 | QASQDIS | 12243 | KLLIYEASTLQS | 13153 | QQSYSTPFT | 12763 |
| | NYLN | | | | | |
| 309 | QASQDIST | 12244 | KLLIYRASTLES | 13154 | QQSYSIPLT | 12764 |
| | WLA | | | | | |
| 310 | RASQNIN- | 12245 | KLLIYAASRLQS | 13155 | QQSYSAPVT | 12765 |
| | NYLN | | | | | |
| 311 | RASQNINT | 12246 | KLLIYAASSLQS | 13156 | QQAYSFPFT | 12766 |
| | WLA | | | | | |
| 312 | RASQRIGN | 12247 | KLLIYAASSLQS | 13157 | QQSYSTPLT | 12767 |
| | YLN | | | | | |
| 313 | RASQSIST | 12248 | KLLIYAASTLQS | 13158 | QQSYRTVT | 12768 |
| | YLN | | | | | |
| 314 | RASQSVG | 12249 | RLLIYGASTRAT | 13159 | QQYDSSSQT | 12769 |
| | SYLA | | | | | |
| 315 | RASRSVST | 12250 | RLLIYGASTRAT | 13160 | QQYDGSPYT | 12770 |
| | YLA | | | | | |
| 316 | RSSQSLLH | 12251 | QLLIYDASNLET | 13161 | MQALQTPPA | 12771 |
| | SNGYNYL | | | | | |
| | D | | | | | |
| 317 | KSS- | 12252 | KLLIYWASTRES | 13162 | QQYYSAPPT | 12772 |
| | QSVLSSSY | | | | | |
| | NKNFLA | | | | | |
| 318 | KSS- | 12253 | KLLIYWASTRES | 13163 | QQYYSDPIT | 12773 |
| | QSVLSSSY | | | | | |
| | NKNFLA | | | | | |
| 319 | KSS- | 12254 | KLLIYWASARES | 13164 | QQYYSIPIA | 12774 |
| | QSVLSSSY | | | | | |
| | NKNYLA | | | | | |
| 320 | KSS- | 12255 | KLLIYWASTRDS | 13165 | QQYYSIPYT | 12775 |
| | QSVLSSSY | | | | | |
| | NKNYLA | | | | | |
| 321 | KSS- | 12256 | KLLIYWASTRAS | 13166 | QQYYTTPPT | 12776 |
| | QSVLSTSY | | | | | |
| | NKNYLA | | | | | |
| 322 | KSS- | 12257 | KLLIYWASTRQS | 13167 | QQYYSTPYT | 12777 |
| | QSVLSTSY | | | | | |
| | NRNFLA | | | | | |
| 323 | KSS- | 12258 | KLLIYWASTRES | 13168 | QQYYSTPLT | 12778 |
| | QSVLYSSN | | | | | |
| | NKNYLA | | | | | |
| 324 | QASQDIS | 12259 | KLLIYAASSLQS | 13169 | QQSYSTPT | 12779 |
| | NYLN | | | | | |
| 325 | QASQDIS | 12260 | KLLIYGASTLQS | 13170 | QEADSFPLT | 12780 |
| | NYLN | | | | | |
| 326 | RASQGIRN | 12261 | KLLIYDASSLHS | 13171 | QQAYSFPWT | 12781 |
| | DLG | | | | | |
| 327 | RASQGISN | 12262 | KLLIYKASSLES | 13172 | QQSYNTPFT | 12782 |
| | YLA | | | | | |
| 262 | RASQGISN | 12263 | KLLIYKASSLES | 13173 | QQSYNTPFT | 12783 |
| | YLA | | | | | |
| 328 | RASQSINR | 12264 | KLLIYSASNLQS | 13174 | QQSYNTPLT | 12784 |
| | WLA | | | | | |
| 329 | RASQSINT | 12265 | KLLIYAASSLQS | 13175 | QQANSFPFT | 12785 |
| | WLA | | | | | |
| 330 | RASQSIRT- | 12266 | KLLIYDASSLET | 13176 | QQLNSYPLT | 12786 |
| | WLA | | | | | |
| 331 | RASQSIRT | 12267 | KLLIYAASTLQS | 13177 | QQSYSAPLT | 12787 |
| | YLN | | | | | |
| 332 | RASQSIST | 12268 | KLLIYAASSLHS | 13178 | QQSYSTPLT | 12788 |
| | YLN | | | | | |
| 333 | RASQSIT- | 12269 | KLLIYAASTLQS | 13179 | QQSYSTPLT | 12789 |
| | TYLN | | | | | |
| 334 | RSSQSLLH | 12270 | QLLIYAASSLQS | 13180 | MQARQTPLT | 12790 |
| | SNGYNYL | | | | | |
| | D | | | | | |
| 335 | RSSQSLLH | 12271 | QLLIYGASSLQS | 13181 | MQTLQTPFT | 12791 |
| | SNGYNYL | | | | | |
| | D | | | | | |
| 336 | RSSQSLLH | 12272 | QLLIYLGSDRAS | 13182 | MQALQTPLT | 12792 |
| | SNGYNYL | | | | | |
| | D | | | | | |
| 337 | KSSQTVF- | 12273 | KLLIYWASTRES | 13183 | QQYYSTPLT | 12793 |
| | STSYN- | | | | | |
| | KNYLA | | | | | |
| 338 | KTSQSVF- | 12274 | KLLIYWASTRES | 13184 | QQYYSSPPT | 12794 |
| | STSYN- | | | | | |
| | RDYLA | | | | | |
| 339 | RASQSISS | 12275 | KLLIYDASTLQS | 13185 | QQSYSTPFT | 12795 |
| | WLA | | | | | |
| 340 | RASQSIS- | 12276 | KLLIYDASNLKT | 13186 | QQSYSFPT | 12796 |
| | SYLN | | | | | |
| 341 | RASQSVSS | 12277 | RLLIYDTSSRAT | 13187 | QQYYDTPYT | 12797 |
| | YLA | | | | | |
| 342 | KSS- | 12278 | KLLIYLASTREP | 13188 | QQYYSTPPT | 12798 |
| | QSVLYSSN | | | | | |
| | NKNYLA | | | | | |
| 343 | KSS- | 12279 | KLLIYWASTRES | 13189 | QQYYSTPLT | 12799 |
| | QSVLSSSY | | | | | |
| | NKNYVA | | | | | |
| 344 | QASQDIS | 12280 | KLLIYAAASLQS | 13190 | QQTYSTPWT | 12800 |
| | NYLN | | | | | |
| 345 | RASQDIN- | 12281 | KLLIYAASSLQS | 13191 | QQSSSFPLT | 12801 |
| | TYLA | | | | | |
| 346 | QASQDIS | 12282 | KLLIYAASSLQS | 13192 | QQLYNFPYT | 12802 |
| | NYLN | | | | | |
| 347 | RASQSISR | 12283 | KLLIYGASTRES | 13193 | QQSYNTPLT | 12803 |
| | YLA | | | | | |
| 348 | RASQTLSG | 12284 | KLLIYGASTLQG | 13194 | QQYYSYPPT | 12804 |
| | WLA | | | | | |
| 349 | FASQDI- | 12285 | KLLIYEASNLET | 13195 | QQSYSTPLT | 12805 |
| | INYLN | | | | | |
| 350 | RASQSIS- | 12286 | KLLIYDVFNLGT | 13196 | QQSYSSPFT | 12806 |
| | SYLN | | | | | |
| 351 | QASQDIS | 12287 | KLLIYMASNLES | 13197 | QQTNSFPLT | 12807 |
| | NYLN | | | | | |
| 352 | RASQSIS- | 12288 | KLLIYDASNLET | 13198 | QQSYSTPLT | 12808 |
| | SYLN | | | | | |
| 353 | RSSQSLLH | 12289 | QLLIYLGSNRAS | 13199 | MQALQSPWT | 12809 |
| | SNGYNYL | | | | | |
| | D | | | | | |
| 354 | KSS- | 12290 | KLLIYWASTRES | 13200 | QQYYSSPLT | 12810 |
| | QSVLYSSN | | | | | |
| | NKNYLA | | | | | |
| 355 | RSSQSLLH | 12291 | QLLIYLGSNRAS | 13201 | MQALQTPPS | 12811 |
| | SNGYNYL | | | | | |
| | D | | | | | |
| 356 | RAS- | 12292 | KLLIYKASRLES | 13202 | QQSYKTPYT | 12812 |
| | ESVST- | | | | | |
| | WLA | | | | | |
| 357 | KSS- | 12293 | KLLIYWASTRES | 13203 | QQYFTTPLT | 12813 |
| | QSVLYSSN | | | | | |
| | NKNYLA | | | | | |
| 358 | RASQSIS- | 12294 | KLLIYAASSLQS | 13204 | QQSYSTPYT | 12814 |
| | SYLN | | | | | |
| 359 | KSS- | 12295 | KLLIYWASTRAS | 13205 | QQYYDTPLT | 12815 |
| | QSVLSSSY | | | | | |
| | NKNYLA | | | | | |
| 360 | RASQSIS- | 12296 | KLLIYKASTLES | 13206 | QQNDSIPIT | 12816 |
| | SYLN | | | | | |
| 361 | RASQSISR | 12297 | KLLIYDASNLET | 13207 | LQDYSYPLT | 12817 |
| | WLA | | | | | |
| 362 | KTSQSVF- | 12298 | KLLIYWASTRAA | 13208 | QQYYYTST | 12818 |
| | STSYN- | | | | | |
| | RDYLA | | | | | |
| 363 | RASQSIN- | 12299 | KLLIYAASSLQS | 13209 | QQANSFPPT | 12819 |
| | RYLN | | | | | |
| 364 | RASQGISN | 12300 | KLLIYSASNLQS | 13210 | QQSYSTPLT | 12820 |
| | YLA | | | | | |
| 259 | RASQGISN | 12301 | KLLIYSASNLQS | 13211 | QQSYSTPLT | 12821 |
| | YLA | | | | | |
| 365 | RASQSIDS | 12302 | KLLIYKASTLES | 13212 | QQSYSAPLT | 12822 |
| | YLN | | | | | |
| 366 | RASQDIST | 12303 | KLLIYDASNLET | 13213 | QQVNSDPYT | 12823 |
| | WLA | | | | | |
| 367 | QASQDIS | 12304 | KLLIYAASTLES | 13214 | QQGDSLPLT | 12824 |
| | NYLN | | | | | |
| 368 | RASQGISN | 12305 | KLLIYAASSLQS | 13215 | QQSDSFPYT | 12825 |
| | YLA | | | | | |
| 369 | RASQSVST | 12306 | RLLIYGASTRAT | 13216 | QQHDSYPLT | 12826 |
| | YLA | | | | | |
| 370 | RASQGIRN | 12307 | KLLIYAASSLQS | 13217 | QQANSFPPT | 12827 |
| | DLG | | | | | |
| 371 | RAS- | 12308 | KLLIYKASNLES | 13218 | QQTDSTFIT | 12828 |
| | ESISTYLN | | | | | |
| 372 | RASRNIHD | 12309 | KLLIYAASTLQT | 13219 | QQTYSTPPT | 12829 |
| | YLN | | | | | |
| 373 | RASQSND | 12310 | KLLIYKASTLES | 13220 | QQSYSSPLT | 12830 |
| | SYLN | | | | | |
| 374 | RASQSISD | 12311 | KLLIYAASTLQS | 13221 | QQSYSSPYT | 12831 |
| | FLN | | | | | |
| 375 | QASQDIS | 12312 | KLLIYAASSLQS | 13222 | QQANRFPLT | 12832 |
| | NYLN | | | | | |
| 376 | QASQDIS | 12313 | KLLIYKASNLQS | 13223 | QQSYNFPAT | 12833 |
| | NYLN | | | | | |
| 377 | RSSQSLLH | 12314 | QLLIYLGSNRAS | 13224 | MQGTHWPET | 12834 |
| | SNGYNYL | | | | | |
| | D | | | | | |
| 378 | RASQSIS- | 12315 | KLLIYDASNLET | 13225 | QQSYSTPLT | 12835 |
| | SYLN | | | | | |
| 379 | RASQGISD | 12316 | KLLIYDASNLET | 13226 | QQSYILPLT | 12836 |
| | YLA | | | | | |
| 380 | RASQDIN | 12317 | KLLIYAASSLQS | 13227 | QQSYSAPYT | 12837 |
| | DFLA | | | | | |
| 381 | RASQSISN | 12318 | KLLIYAASKLES | 13228 | QQSYSSPWT | 12838 |
| | WLA | | | | | |
| 382 | RASQGIDS | 12319 | KLLIYAASTLES | 13229 | QQAYSFPLT | 12839 |
| | WLA | | | | | |
| 383 | RASQNIGT | 12320 | KLLIYRASSLES | 13230 | QQAYSFPWT | 12840 |
| | WLA | | | | | |
| 384 | RASQNIN | 12321 | KLLIYKASTLQS | 13231 | QQADSFPPT | 12841 |
| | NWLA | | | | | |
| 385 | RASQDIS- | 12322 | KLLIYAASTLQS | 13232 | QQLNRYPIT | 12842 |
| | SYLA | | | | | |
| 386 | RASQDISN | 12323 | KLLIYAASILHS | 13233 | QQYDSSFIT | 12843 |
| | YLA | | | | | |

TABLE 24
CDRs using the IMGT Numbering Scheme
Table 6-IMGT CDR Sequences

| Binder | | SEQ ID | | SEQ ID | | SEQ |
|---|---|---|---|---|---|---|
| Name | Sequence | NO: | Sequence | NO: | Sequence | ID NO: |
| | HCDR1 | | HCDR2 | | HCDR3 | |
| 109 | GYTFSSYW | 4361 | ILPGSGST | 4875 | ARRAYGYDGGFDY | 4105 |
| 110 | GYTFSSYW | 4362 | ILPGSGST | 4876 | ARRAYGYDEGFDY | 4106 |
| 111 | GYTFSSYW | 4363 | ILPGSDST | 4877 | ARRAYGYDEGFDY | 4107 |
| 112 | AYTFSIYW | 4364 | ILPGSGST | 4878 | ARRAYGYDGGFDY | 4108 |
| 1 | GYTFSSYW | 4365 | IFPGSGHT | 4879 | ARRGYGYDEGFDY | 4109 |
| 113 | GYTFSSYW | 4366 | ILPGSGST | 4880 | ARRGYGYDEGFDY | 4110 |
| 114 | GYTFSSYW | 4367 | ILPGSGST | 4881 | ARRGYGYDEGFDY | 4111 |
| 115 | GYTFSNYW | 4368 | ILPGSGST | 4882 | ARRGYGYDEGFDY | 4112 |
| 23 | GYTFSSYW | 4369 | ILPGSGST | 4883 | ARRGYGYDEGFDY | 4113 |
| 116 | GYTFSSYW | 4370 | ILPGSGYT | 4884 | ARRGYGYDEGFDY | 4114 |
| 117 | GYTFSSYW | 4371 | ILPGSGST | 4885 | ARRAYGYDEGFDY | 4115 |
| 2 | GYTLSSYW | 4372 | ILPGSGST | 4886 | ARRGYGYDEGFDY | 4116 |
| 118 | GYTFSSYW | 4373 | VLPGSGST | 4887 | ARRAYGYDEGFDY | 4117 |
| 119 | GYTFSSYW | 4374 | ISPGSGST | 4888 | ARRGYGYDEGFDY | 4118 |
| 120 | GYTFGTYW | 4375 | ILPGSGTP | 4889 | ARRAYGYDAGFDY | 4119 |
| 121 | GYTFSSYW | 4376 | ILPGSGST | 4890 | ARRGYGYDEGFDY | 4120 |
| 122 | GYTFSSYW | 4377 | ILPGSGRT | 4891 | ARRGYGYDEGFDY | 4121 |
| 123 | GYTFSSYW | 4378 | ILPGSGRT | 4892 | ARRGYGYDEGFDY | 4122 |
| 38 | GYTFSSYW | 4379 | ILPGSGST | 4893 | ARRAYGYDEGFDY | 4123 |
| 39 | GYTFSSYW | 4380 | VLPGSGST | 4894 | ARRAYGYDEGFDY | 4124 |
| 40 | GYTFSSYW | 4381 | ILPGSGRT | 4895 | ARRGYGYDEGFDY | 4125 |
| 41 | GYTFSSYW | 4382 | VLPGSGST | 4896 | ARRAYGYDEGFDY | 4126 |
| 42 | GYTFSSYW | 4383 | ILPGSGRT | 4897 | ARRGYGYDEGFDY | 4127 |
| 43 | GYTFSSYW | 4384 | ILPGSGST | 4898 | ARRAYGYDGGFDY | 4128 |
| 44 | GYTFSSYW | 4385 | ILPGSDST | 4899 | ARRAYGYDEGFDY | 4129 |
| 45 | AYTFSIYW | 4386 | ILPGSGST | 4900 | ARRAYGYDGGFDY | 4130 |
| 46 | GYTFSSYW | 4387 | IFPGSGHT | 4901 | ARRGYGYDEGFDY | 4131 |
| 47 | GYTFSNYW | 4388 | ILPGSGST | 4902 | ARRGYGYDEGFDY | 4132 |
| 47 | GYTFSNYW | 4388 | ILPGSGST | 4902 | ARRGYGYDEGFDY | 4132 |
| 48 | GYTFSSYW | 4389 | ILPGSGST | 4903 | ARRGYGYDEGFDY | 4133 |
| 48 | GYTFSSYW | 4389 | ILPGSGST | 4903 | ARRGYGYDEGFDY | 4133 |
| 49 | GYTFSSYW | 4390 | ILPGSGYT | 4904 | ARRGYGYDEGFDY | 4134 |
| 50 | GYTLSSYW | 4391 | ILPGSGST | 4905 | ARRGYGYDEGFDY | 4135 |
| 51 | GYTFSSYW | 4392 | ISPGSGST | 4906 | ARRGYGYDEGFDY | 4136 |
| 52 | GYTFGTYW | 4393 | ILPGSGTP | 4907 | ARRAYGYDAGFDY | 4137 |
| 53 | GYTFSSYW | 4394 | ILPGSGST | 4908 | ARRGYGYDEGFDY | 4138 |
| 54 | GYTFSSYW | 4395 | ILPGSGRT | 4909 | ARRGYGYDEGFDY | 4139 |
| 55 | GYTFSNYW | 4396 | ILPGSGST | 4910 | ARRGYGYDEGFDY | 4140 |
| 56 | GYTFSSYW | 4397 | ILPGSGST | 4911 | ARRGYGYDEGFDY | 4141 |
| 3 | GYSFTGYY | 4398 | ISSYNGAT | 4912 | ARGRYGEYFDY | 4142 |
| 4 | GYSFTGYY | 4399 | ISSYNGVT | 4913 | ARGRYGDYFDY | 4143 |
| 5 | GYSFTGYY | 4400 | ISSYNGVT | 4914 | ARGRYGDYFDY | 4144 |
| 6 | GYSFTGYY | 4401 | ISSYNGVT | 4915 | ARGRYGDYFDY | 4145 |
| 7 | GYSFTGYY | 4402 | ISSYNGAN | 4916 | ARGRYGDYFDY | 4146 |
| 8 | GYSFTGYY | 4403 | ISSYNGVT | 4917 | ARGRYGDYFDY | 4147 |
| 9 | GYSFTGYY | 4404 | ISSYNGVT | 4918 | ARGRYGDYFDY | 4148 |
| 10 | GYSFTGYY | 4405 | ISSYNGVT | 4919 | ARGRYGDYFDY | 4149 |
| 11 | GYSFTGYY | 4406 | ISSYNGVT | 4920 | ARGRYGDYFDY | 4150 |
| 12 | GYSFTGFY | 4407 | ISSYNGAT | 4921 | ARGRYGDYFDY | 4151 |
| 13 | GYSFTGYY | 4408 | ISSYNGAT | 4922 | ARGRYGDYFDY | 4152 |
| 57 | GYSFTGYY | 4409 | ISSYNGVT | 4923 | ARGRYGDYFDY | 4153 |
| 58 | GYSFTGYY | 4410 | ISSYNGAT | 4924 | ARGRYGEYFDY | 4154 |
| 124 | GFSLSSYG | 4411 | IWRGGST | 4925 | AKNLYGHYVMDY | 4155 |
| 125 | GFSVTSYG | 4412 | IWRGGST | 4926 | AKNLYGHYVMDY | 4156 |
| 126 | GFSLTSYG | 4413 | IWRGGST | 4927 | AKNLYGHYVMDY | 4157 |
| 127 | GFSLTRYG | 4414 | IWRGGST | 4928 | AKNLYGHYVMDY | 4158 |
| 128 | GFSVTTYG | 4415 | IWRGGST | 4929 | AKNLYGHYVMDY | 4159 |
| 129 | GFSVTSYG | 4416 | IWRGGST | 4930 | AKNLYGHYVMDY | 4160 |
| 130 | GFSLTRYG | 4417 | IWRGGST | 4931 | AKNLYGHYVMDY | 4161 |
| 59 | GFSLSSYG | 4418 | IWRGGST | 4932 | AKNLYGHYVMDY | 4162 |
| 60 | GFSVTSYG | 4419 | IWRGGST | 4933 | AKNLYGHYVMDY | 4163 |
| 61 | GFSLTSYG | 4420 | IWRGGST | 4934 | AKNLYGHYVMDY | 4164 |
| 62 | GFSLTRYG | 4421 | IWRGGST | 4935 | AKNLYGHYVMDY | 4165 |
| 63 | GFSVTTYG | 4422 | IWRGGST | 4936 | AKNLYGHYVMDY | 4166 |
| 131 | GYTFTSYW | 4423 | IHPNSGST | 4937 | ARWGDGYSFAY | 4167 |
| 132 | GYTFTSYW | 4424 | IHPNSGST | 4938 | ARWGDGYSFAY | 4168 |
| 133 | GYTFTTYW | 4425 | IHPNSDNT | 4939 | ARWGDGYSFAY | 4169 |
| 14 | GYTFTSYW | 4426 | IHPNSGTT | 4940 | ARWGDGYSFAY | 4170 |
| 134 | GYTFTSYW | 4427 | IHPNSGNT | 4941 | ARWGDGYSFAY | 4171 |
| 64 | GYTFTSYW | 4428 | IHPNSGST | 4942 | ARWGDGYSFAY | 4172 |
| 65 | GYTFTSYW | 4429 | IHPNSGTT | 4943 | ARWGDGYSFAY | 4173 |
| 135 | GYTFTDYV | 4430 | IYPGSGST | 4944 | ARRGERGPWFAY | 4174 |
| 136 | GYTFTDYV | 4431 | IYPGSGSS | 4945 | ARRGERGPWFAY | 4175 |
| 137 | GYTFTDYV | 4432 | IYPGSGSS | 4946 | ARRGERGPWFAY | 4176 |
| 138 | GYTFTDYV | 4433 | IYPGSGSS | 4947 | ARRGERGPWFAY | 4177 |
| 15 | GYTFTDYV | 4434 | IYPGSGSS | 4948 | ARRGERGPWFAY | 4178 |
| 66 | GYTFTDYV | 4435 | IYPGSGST | 4949 | ARRGERGPWFAY | 4179 |
| 67 | GYTFTDYV | 4436 | IYPGSGSS | 4950 | ARRGERGPWFAY | 4180 |
| 68 | GYTFTDYV | 4437 | IYPGSGSS | 4951 | ARRGERGPWFAY | 4181 |
| 69 | GYTFTDYV | 4438 | IYPGSGSS | 4952 | ARRGERGPWFAY | 4182 |
| 24 | GYTFTNYW | 4439 | IDPSDSET | 4953 | ATYDVYYRFAY | 4183 |
| 139 | GYTFTNYW | 4440 | IDPSDSET | 4954 | ATYDGYYRFAY | 4184 |
| 140 | GYTFTNYW | 4441 | IDPSDSET | 4955 | ATYDIYYRFAY | 4185 |
| 16 | GYTFTSYW | 4442 | IHPNSGST | 4956 | ARPGGYGFVY | 4186 |
| 141 | GYTFTSYW | 4443 | IHPNSDST | 4957 | ARPGGYGFAD | 4187 |
| 142 | GYTFTTYW | 4444 | IHPNSGST | 4958 | ARPGGYGFTY | 4188 |
| 143 | GYTFTSYW | 4445 | IHPNSGSP | 4959 | ARPGGYGFAY | 4189 |
| 70 | GYTFTSYW | 4446 | IHPNSGSP | 4960 | ARPGGYGFAY | 4190 |
| 25 | GYTFTSYW | 4447 | IYPSDSYT | 4961 | TRGNYIDY | 4191 |
| 144 | GYTFTSYW | 4448 | IYPSDSYT | 4962 | TRGNYIDY | 4192 |
| 145 | GYTFTDYW | 4449 | IYPSDSYT | 4963 | TRGNYIDY | 4193 |
| 146 | GYTFTDYV | 4450 | IYPGSGSS | 4964 | ARPGDLGFAY | 4194 |
| 147 | GYTFTDYV | 4451 | IYPGSGSN | 4965 | ARPGDLGFAY | 4195 |
| 148 | GYTFTDYV | 4452 | IYPGSGSS | 4966 | ARPGDLGFAY | 4196 |
| 71 | GYTFTDYV | 4453 | IYPGSGSS | 4967 | ARPGDLGFAY | 4197 |
| 72 | GYTFTDYV | 4454 | IYPGSGSS | 4968 | ARPGDLGFAY | 4198 |
| 73 | GYTFTDYV | 4455 | IYPGSGSN | 4969 | ARPGDLGFAY | 4199 |
| 74 | GYTFTDYV | 4456 | IYPGSGSS | 4970 | ARPGDLGFAY | 4200 |
| 74 | GYTFTDYV | 4456 | IYPGSGSS | 4970 | ARPGDLGFAY | 4200 |
| 75 | GYTFTDYV | 4457 | IYPGSGSS | 4971 | ARPGDLGFAY | 4201 |
| 75 | GYTFTDYV | 4457 | IYPGSGSS | 4971 | ARPGDLGFAY | 4201 |
| 76 | GYTFTDYV | 4458 | IYPGSGSS | 4972 | ARPGDLGFAY | 4202 |
| 149 | GFSLTNYG | 4459 | VWAGGIT | 4973 | ARGDGYDDGYAMDY | 4203 |
| 150 | GFSLTSYG | 4460 | LWAGGIT | 4974 | ARGDGYDDGYAMDY | 4204 |
| 26 | GFSLTSYG | 4461 | IWAGGTT | 4975 | ARGDGYDDGYAMDY | 4205 |
| 77 | GFSLTNYG | 4462 | VWAGGIT | 4976 | ARGDGYDDGYAMDY | 4206 |
| 78 | GFSLTSYG | 4463 | LWAGGIT | 4977 | ARGDGYDDGYAMDY | 4207 |
| 79 | GFSLTSYG | 4464 | IWAGGTT | 4978 | ARGDGYDDGYAMDY | 4208 |
| 151 | GYSFTSYW | 4465 | IDPSDSET | 4979 | ARTRNY | 4209 |
| 152 | GYSFTSYW | 4466 | IDPSDSET | 4980 | ARTRNY | 4210 |
| 153 | GYSFTSYW | 4467 | IDPSDSET | 4981 | ARTRNY | 4211 |
| 154 | GFNIKDYY | 4468 | IDPENGDT | 4982 | NAPLLRYSSAMDY | 4212 |
| 155 | GFNIKDYY | 4469 | IDPENGDT | 4983 | NAPLLRYSSSMDY | 4213 |
| 156 | GFNIKDYY | 4470 | IDPENGDT | 4984 | NVALLRYSSAMDY | 4214 |
| 80 | GFNIKDYY | 4471 | IDPENGDT | 4985 | NAPLLRYSSAMDY | 4215 |
| 81 | GFNIKDYY | 4472 | IDPENGDT | 4986 | NAPLLRYSSSMDY | 4216 |
| 82 | GFNIKDYY | 4473 | IDPENGDT | 4987 | NVALLRYSSAMDY | 4217 |
| 17 | GFNIKDTS | 4474 | IDPANGNT | 4988 | ARGPDDGYFYYYSMDY | 4218 |
| 157 | GYTFSNYY | 4475 | INPSNGDT | 4989 | TSYYTHEAYYYAMDC | 4219 |
| 27 | GSTFTTYY | 4476 | INPSNGGT | 4990 | TSYYTHETYYYAMDY | 4220 |
| 158 | GFNIKDYY | 4477 | IDPEDGDT | 4991 | TPYSIYDAMDY | 4221 |
| 159 | GYTFTDYV | 4478 | IYPGSGST | 4992 | ARRGERGPWFAY | 4222 |
| 83 | GYTFTDYV | 4479 | IYPGSGST | 4993 | ARRGERGPWFAY | 4223 |
| 160 | GYSFTDYG | 4480 | ISTYYGDA | 4994 | ARQMDYDYTYYYAMDY | 4224 |
| 28 | GYTFTSYW | 4481 | IDPSDSYT | 4995 | ARAEYGYGNYPWFAY | 4225 |
| 84 | GYTFTSYW | 4482 | IDPSDSYT | 4996 | ARAEYGYGNYPWFAY | 4226 |
| 29 | GYTFTSYW | 4483 | IHPSDSDT | 4997 | AIPYYYGGWYFDV | 4227 |
| 161 | GYTFTDYV | 4484 | IYPGSGST | 4998 | ARMDGPWFAY | 4228 |
| 30 | GFTFSSYG | 4485 | ISSGGSYT | 4999 | ARLYDAHWDYFDY | 4229 |
| 162 | GISLSTSGMG | 4486 | IWNNDN | 5000 | AWRPYYRYDSFAY | 4230 |
| 18 | GYTFTNYG | 4487 | INTYTGEP | 5001 | ARKYYDYEFAY | 4231 |
| 85 | GYTFTNYG | 4488 | INTYTGEP | 5002 | ARKYYDYEFAY | 4232 |
| 163 | GYTFTDYE | 4489 | IDPETGGT | 5003 | TRLGDYDVMDY | 4233 |
| 86 | GYTFTDYE | 4490 | IDPETGGT | 5004 | TRLGDYDVMDY | 4234 |
| 164 | GYTFTSYW | 4491 | IDPSDSYT | 5005 | ARAGRYGSSFDY | 4235 |
| 165 | GFSLSTSGMG | 4492 | IYWDDDK | 5006 | AGRPDDYDGAWFPY | 4236 |
| 31 | GYTFTSSW | 4493 | IHPNSGNT | 5007 | AIYYDYDAYYFDY | 4237 |
| 87 | GYTFTSSW | 4494 | IHPNSGNT | 5008 | AIYYDYDAYYFDY | 4238 |
| 32 | GYTFTSYW | 4495 | IHPNSGST | 5009 | ANPYYGYDVGY | 4239 |
| 166 | GYTFTDYV | 4496 | IYPGSGSN | 5010 | AREEKIYFDY | 4240 |
| 88 | GYTFTDYV | 4497 | IYPGSGSN | 5011 | AREEKIYFDY | 4241 |
| 167 | GYTFTSYW | 4498 | IHPNSGST | 5012 | ARYDGYWFDY | 4242 |
| 168 | GYTFTSYW | 4499 | IYPGNSDT | 5013 | TSLITTAYYFDY | 4243 |
| 89 | GYTFTSYW | 4500 | IYPGNSDT | 5014 | TSLITTAYYFDY | 4244 |
| 169 | GYTFTSYW | 4501 | IHPNSGST | 5015 | APETGDYGSSYVWYFDV | 4245 |
| 170 | GYTFTDYV | 4502 | IYPGSGST | 5016 | ARGKVTRFAY | 4246 |
| 171 | GFTFSSYA | 4503 | ISDGGSYT | 5017 | ARDQDSNWEYFDY | 4247 |
| 172 | GYTFTDYS | 4504 | INTETGEP | 5018 | ARESWDRAMDY | 4248 |
| 19 | GFTFSSYA | 4505 | ISSGGSYT | 5019 | ARHEEANWAWFAY | 4249 |
| 90 | GFTFSSYA | 4506 | ISSGGSYT | 5020 | ARHEEANWAWFAY | 4250 |
| 173 | GYSFTNYW | 4507 | IDPSDSET | 5021 | AIPYYAMDY | 4251 |
| 91 | GYSFTNYW | 4508 | IDPSDSET | 5022 | AIPYYAMDY | 4252 |
| 174 | GYTFTSSW | 4509 | IHPNSGNT | 5023 | ATYYGNYVWYFDV | 4253 |
| 92 | GYTFTSSW | 4510 | IHPNSGNT | 5024 | ATYYGNYVWYFDV | 4254 |
| 175 | GYTFTSYW | 4511 | IHPNSGST | 5025 | ASYGSSYWYFDV | 4255 |
| 93 | GYTFTSYW | 4512 | IHPNSGST | 5026 | ASYGSSYWYFDV | 4256 |
| 20 | GFSLTSYG | 4513 | IWSGGST | 5027 | ASYYGSSRSYWYLDV | 4257 |
| 94 | GFSLTSYG | 4514 | IWSGGST | 5028 | ASYYGSSRSYWYLDV | 4258 |
| 176 | GYTFTSYN | 4515 | LYSGNGDT | 5029 | ARDYYGSSHLWYFDV | 4259 |
| 177 | GFSLSTSGMG | 4516 | IYWDDDK | 5030 | ARRAHYDYGWYFDV | 4260 |
| 178 | GYTFTSYW | 4517 | IHPNSGST | 5031 | AGYDYDWYFDV | 4261 |
| 33 | GFTFSSYG | 4518 | ISSGGSYT | 5032 | TRHDDSSYDWFAY | 4262 |
| 179 | GFTFSSYG | 4519 | ISSGGSYT | 5033 | ARHEDSNYHYFDY | 4263 |
| 34 | GYTFTNYW | 4520 | IHPNSGTT | 5034 | ARFGDGYHFDY | 4264 |
| 180 | GFTFSSYG | 4521 | ISSGGSYT | 5035 | ARQNDSSWAWFAY | 4265 |
| 95 | GFTFSSYG | 4522 | ISSGGSYT | 5036 | ARQNDSSWAWFAY | 4266 |
| 181 | GYTFTSYW | 4523 | IHPNSGST | 5037 | ALPYSNYGWYFDV | 4267 |
| 96 | GYTFTSYW | 4524 | IHPNSGST | 5038 | ALPYSNYGWYFDV | 4268 |
| 182 | GYTFTSYW | 4525 | IDPSDSET | 5039 | ARDYYGSYWYFDV | 4269 |
| 97 | GYTFTSYW | 4526 | IDPSDSET | 5040 | ARDYYGSYWYFDV | 4270 |
| 183 | GFNIKDYY | 4527 | IDPEDGET | 5041 | AAYGNSAWFAY | 4271 |
| 98 | GFNIKDYY | 4528 | IDPEDGET | 5042 | AAYGNSAWFAY | 4272 |
| 35 | GYTFTNYG | 4529 | INTNTGEP | 5043 | ARWYPYFDY | 4273 |
| 99 | GYTFTNYG | 4530 | INTNTGEP | 5044 | ARWYPYFDY | 4274 |
| 100 | GYTFTNYG | 4531 | INTNTGEP | 5045 | ARWYPYFDY | 4275 |
| 36 | GYTFTSYW | 4532 | INPSSGYT | 5046 | ARSDGSSGNWYFDV | 4276 |
| 101 | GYTFTSYW | 4533 | INPSSGYT | 5047 | ARSDGSSGNWYFDV | 4277 |
| 184 | GFSLTSYG | 4534 | IWAGGST | 5048 | AREGGYTGYFDV | 4278 |
| 102 | GFSLTSYG | 4535 | IWAGGST | 5049 | AREGGYTGYFDV | 4279 |
| 185 | GYTFTSYW | 4536 | IDPSDSET | 5050 | AYSNYVPYYAMDY | 4280 |
| 103 | GYTFTSYW | 4537 | IDPSDSET | 5051 | AYSNYVPYYAMDY | 4281 |
| 186 | GYTFTDYV | 4538 | IYPGSGSA | 5052 | ARRGFDY | 4282 |
| 21 | GFTFSSYG | 4539 | ISSGGSYT | 5053 | ARHNYSNWDWFAY | 4283 |
| 187 | GYTFTSYW | 4540 | IHPNSGST | 5054 | ARDYYGSGYGYYFDY | 4284 |
| 188 | GYTFTSYW | 4541 | IHPNSGST | 5055 | ARDYYGSSYGWYFDV | 4285 |
| 189 | GYTFTSYW | 4542 | IHPNSGST | 5056 | ARDYYGSSYGWYFDV | 4286 |
| 190 | GYTFTSYW | 4543 | IHPNSGST | 5057 | ASDYYGSSYGWYFDV | 4287 |
| 191 | GYTFTSYW | 4544 | IHPNSGST | 5058 | ARDYYGSSYGWYFDV | 4288 |
| 192 | GYTFTSYW | 4545 | IHPNSGST | 5059 | TRDYYGSGYGWYFDV | 4289 |
| 193 | GYTFTNYW | 4546 | IDPSDSET | 5060 | ATYDGYYRFAY | 4290 |
| 194 | GYTFTNYW | 4547 | IDPSDSET | 5061 | ATYDVYYRFAY | 4291 |
| 195 | GYTFTSYW | 4548 | IHPNSGST | 5062 | ARDYGNYDYAMDY | 4292 |
| 104 | GYTFTSYW | 4549 | IHPNSGST | 5063 | ARDYGNYDYAMDY | 4293 |
| 37 | GYTFTSYW | 4550 | IHPNSGST | 5064 | ARDYGNYDYAMDY | 4294 |
| 196 | GYTFTSYW | 4551 | IHPNSGST | 5065 | ARDYGNYDYAMDY | 4295 |
| 197 | GFTFSSYG | 4552 | ISSGGSYT | 5066 | ASQLTGTWYYFDY | 4296 |
| 198 | GFTFSSYG | 4553 | ISSGGSYT | 5067 | ASQLTGTWYYFDY | 4297 |
| 199 | GFTFSSYG | 4554 | ISSGGSYT | 5068 | ASQLTGTWYYFDY | 4298 |
| 22 | GFNIKDTS | 4555 | IDPANGNT | 5069 | ARGPDDGYFYYYSMDY | 4299 |
| 200 | GFTFSNYY | 4556 | INSNGGST | 5070 | ARQEGIGYAMDY | 4300 |
| 201 | GYTFTEYT | 4557 | IYPNNGGT | 5071 | ARGGWLLGY | 4301 |
| 202 | GFSLTSYG | 4558 | IWSGGST | 5072 | ARDGGIRGAMDY | 4302 |
| 203 | GYTFSSYW | 4559 | ILPGSGST | 5073 | ARRGYGYDEGFDY | 4303 |
| 204 | GYTFTDYE | 4560 | IDPETGGT | 5074 | TRNYDYAMDY | 4304 |
| 205 | GFTFSSYY | 4561 | INSNGGST | 5075 | ARQEGIGYALDY | 4305 |
| 206 | GFTFSSYA | 4562 | ISSGGST | 5076 | AREREWGVYYGSSLDY | 4306 |
| 207 | GFNIKDTY | 4563 | IDPANGNT | 5077 | ARSDGNYD | 4307 |
| 208 | GFTFSNYY | 4564 | INSNGGST | 5078 | ARQEGIGYGMDY | 4308 |
| 209 | GFTFNTYV | 4565 | IRSKSDNYAT | 5079 | VRHDGVVGFDV | 4309 |
| 210 | GYSITSGYY | 4566 | ISYDGSN | 5080 | ARGGGRG | 4310 |
| 211 | GYTFTDYS | 4567 | INTETGEP | 5081 | ARDYYDYYYAMDY | 4311 |
| 212 | GYTFTDYS | 4568 | INTETGEP | 5082 | ARESWDRAMDY | 4312 |
| 213 | GYTFTNYW | 4569 | IDPYDSET | 5083 | ARIYSDYDGAWFAY | 4313 |
| 214 | GYTFTDYY | 4570 | VNPYNGGT | 5084 | ARGTVGFAY | 4314 |
| 215 | GFTFSSYA | 4571 | ISSGGST | 5085 | AREREWGVFYGSSLDY | 4315 |
| 216 | GFTFSSYA | 4572 | ISSGGSYT | 5086 | ARHDDSSYGYFDY | 4316 |
| 217 | GFTFSNYA | 4573 | ISSGGTT | 5087 | ARTMPDV | 4317 |
| 218 | GFSLTSYG | 4574 | IWAGGST | 5088 | ARDTDGYYWAMDY | 4318 |
| 219 | GYSITSDHA | 4575 | ISYSGST | 5089 | ARKWGDY | 4319 |
| 220 | GYTFTDYE | 4576 | IDPETGGT | 5090 | TRNYDYALDY | 4320 |
| 221 | GYSITSGYY | 4577 | ISYDGSN | 5091 | ARGGGRG | 4321 |
| 222 | GFTFSNYY | 4578 | INSNGGST | 5092 | ARQEEIGYAMDY | 4322 |
| 223 | GFNIKDYF | 4579 | IDPETDNT | 5093 | ARSGNMGFTY | 4323 |
| 105 | GFNIKDYF | 4580 | IDPETDNT | 5094 | ARSGNMGFTY | 4324 |
| 224 | GFTFSSYA | 4581 | ISSGGSYT | 5095 | ASQGGSSWGAMDY | 4325 |
| 106 | GFTFSSYA | 4582 | ISSGGSYT | 5096 | ASQGGSSWGAMDY | 4326 |
| 225 | GFTFSSYA | 4583 | ISNGGSYT | 5097 | ARHEITTRFAY | 4327 |
| 226 | GYSITSGYY | 4584 | MSYDGSN | 5098 | AREAGYFDY | 4328 |
| 227 | GFSFNTYA | 4585 | IRSKSNNYAT | 5099 | VRQYGYDFDY | 4329 |
| 228 | GFTFSSYG | 4586 | ISSGGSYT | 5100 | ARHKGVNWDYFDY | 4330 |
| 229 | GYTFTDYE | 4587 | IDPETGGT | 5101 | TRGDGNYDSWYFDV | 4331 |
| 230 | GFTFSSYA | 4588 | ISSGGSYT | 5102 | ARLPVTTVVFDY | 4332 |
| 231 | GFTFSSYA | 4589 | ISSGGSYT | 5103 | ARRPVVVPFDY | 4333 |
| 232 | GFSLTSYG | 4590 | IWSGGST | 5104 | ARGWDADYFDY | 4334 |
| 233 | GYTFTNYW | 4591 | IHPNSGST | 5105 | TRYDYDDY | 4335 |
| 234 | GYTFTDYY | 4592 | INPNNGGT | 5106 | ARSELGLYAMDY | 4336 |
| 235 | GYTFTGYW | 4593 | ILPGSGST | 5107 | ARGRIHYFDY | 4337 |
| 236 | GYTFTGYW | 4594 | ILPGSGST | 5108 | ARGRIHYFDY | 4338 |
| 237 | GFSLTSYG | 4595 | IWSGGST | 5109 | ARKGYGYDWYFDV | 4339 |
| 107 | GFSLTSYG | 4596 | IWSGGST | 5110 | ARKGYGYDWYFDV | 4340 |
| 238 | GYTFTSYW | 4597 | IDPSDSYT | 5111 | ARSSYYYYAMDY | 4341 |
| 108 | GYTFTSYW | 4598 | IDPSDSYT | 5112 | ARSSYYYYAMDY | 4342 |
| 239 | GYSITSGYY | 4599 | ISYDGSN | 5113 | ARGGGRD | 4343 |
| 240 | GFSLTSYG | 4600 | IWSGGST | 5114 | ARGGDYDSYAMDY | 4344 |
| 241 | GYTFTSYW | 4601 | IYPGSGST | 5115 | ARESVYDGYSWYFDV | 4345 |
| 242 | GYSFTDYN | 4602 | INPNYGTT | 5116 | ASTYDYDDWYFDV | 4346 |
| 243 | GYTFTSYW | 4603 | IDPSDSYT | 5117 | ARSGNYLYAMDY | 4347 |
| 244 | GYSFTDYN | 4604 | INPNYGTT | 5118 | AREGTSWYFDV | 4348 |
| 245 | GFSLTSYG | 4605 | IWRGGST | 5119 | AKKGDGYDWYFDV | 4349 |
| 246 | GFSLTSYG | 4606 | IWSGGST | 5120 | AREGNYGSSYDAMDY | 4350 |
| 247 | GYTFTSYW | 4607 | IDPSDSYT | 5121 | ARSSNYPYAMDY | 4351 |
| 248 | GFNIKNTY | 4608 | IDPANGNT | 5122 | AYYSGLY | 4352 |
| 249 | GYTFTSYW | 4609 | IDPSDSET | 5123 | ARRGQIYYGYSWFAY | 4353 |
| 250 | GYTFTDYY | 4610 | INPNNGGT | 5124 | ARSTVVADWYFDV | 4354 |
| 251 | GYTFTSYG | 4611 | IYPRSGNT | 5125 | ARSGSSYGYFDV | 4355 |
| 252 | GFSLTSYG | 4612 | IWSGGST | 5126 | ARKGGYDAYAMDY | 4356 |
| 253 | GYSFTDYN | 4613 | INPNYGTT | 5127 | AREGFITTVVAVDY | 4357 |
| 254 | GYTFTDYE | 4614 | IDPETGGT | 5128 | TREGNYDAMDY | 4358 |
| 255 | GYTFTSYW | 4615 | IDPSDSYT | 5129 | ARWDYYGVDY | 4359 |
| 256 | GFTFSGYW | 4616 | ISPGGGST | 5130 | ASSLTATHTYEYDY | 4360 |
| | LCDR1 | | LCDR2 | | LCDR3 | |
| 97 | QGISNY | 8066 | YTS | | QQYSKLPYT | 6829 |
| 182 | QGISNY | 8067 | YTS | | QQYSKLPYT | 6828 |
| 86 | QDISNY | 8068 | YTS | | QQDNTLPRT | 6793 |
| 96 | QDISNY | 8069 | YTS | | QQGNTLPFT | 6827 |
| 151 | QDISNY | 8070 | STS | | QQGNTLPWT | 6768 |
| 152 | QDISNY | 8071 | STS | | QQGNALPWT | 6769 |
| 153 | QDISNY | 8072 | STS | | QQGNTLPWT | 6770 |
| 163 | QDISNY | 8073 | YTS | | QQDNTLPRT | 6792 |
| 164 | QDISNY | 8074 | YTS | | QQGNTLPWT | 6794 |
| 181 | QDISNY | 8075 | YTS | | QQGNTLPFT | 6826 |
| 202 | QSIVHSNGNTY | 8076 | KVS | | FQGSHVPWT | 6861 |
| 206 | QSIVYSNGNTY | 8077 | KVS | | FQGSHVPPT | 6865 |
| 215 | QSIVHSNGNTY | 8078 | KVS | | FQGSHVPPT | 6874 |
| 242 | QSIVHSNGDTY | 8079 | KVS | | FQGSHVPLT | 6905 |
| 204 | QSLLDSDGKTY | 8080 | LVS | | WQGTHFPWT | 6863 |
| 214 | QSLLDSDGKTY | 8081 | LVS | | WQGTHFPWT | 6873 |
| 220 | QSLLDSDGKTY | 8082 | LVS | | WQGTHFPWT | 6879 |
| 229 | QSLLDSDGKTY | 8083 | LVS | | WQGTHFPWT | 6890 |
| 235 | QSLLDSDGKTY | 8084 | LVS | | WQGTHFPFT | 6896 |
| 162 | ENIYYS | 8085 | NAN | | KQAYDVPYT | 6789 |
| 101 | GNIHNY | 8086 | NAK | | QHFWSTPWT | 6836 |
| 36 | GNIHNY | 8087 | NAK | | QHFWSTPWT | 6835 |
| 188 | GNIHNY | 8088 | NAK | | QHFWSTPWT | 6844 |
| 172 | ENIYSY | 8089 | NAK | | QHFWGTPYT | 6807 |
| 189 | ENIYSY | 8090 | NAK | | QHHYGTPFT | 6845 |
| 249 | ENIYSY | 8091 | NAK | | QHHYGTPYT | 6912 |
| 250 | ENIYSY | 8092 | NAK | | QHHYGTPPT | 6913 |
| 57 | DNIYSN | 8093 | AAT | | QHFWGTPWT | 6712 |
| 58 | ENIYSN | 8094 | AAT | | QHFWGTPWT | 6713 |
| 3 | ENIYSN | 8095 | AAT | | QHFWGTPWT | 6701 |
| 4 | ENIYSN | 8096 | AAT | | QHFWGTPWT | 6702 |
| 5 | ENIYSN | 8097 | AAT | | QHFWGSPWT | 6703 |
| 6 | ENIYSN | 8098 | AAT | | QHFWGTPWT | 6704 |
| 7 | ENIYSN | 8099 | AAT | | QHFWGTPWT | 6705 |
| 8 | ENIYSN | 8100 | AAT | | QHFWGTPWT | 6706 |
| 9 | DNIYSN | 8101 | AAT | | QHFWGTPWT | 6707 |
| 10 | ENIYSN | 8102 | AAT | | QHFWGTPWT | 6708 |
| 11 | ENIYSN | 8103 | AAT | | QHFWGTPWT | 6709 |
| 12 | ENIYSN | 8104 | AAT | | QHFWGTPWT | 6710 |
| 13 | ENIYSN | 8105 | AAT | | QHFWGSPWT | 6711 |
| 17 | ENIYSN | 8106 | AAT | | QHFWGTPWT | 6777 |
| 165 | ENIYSN | 8107 | AAT | | QHFWGTPWT | 6795 |
| 179 | ENIYSN | 8108 | AAT | | QHFWGTPYT | 6822 |
| 194 | ENIYSN | 8109 | AAT | | QHFWGTPFT | 6850 |
| 37 | ENIYSN | 8110 | AAT | | QHFWGTPYT | 6853 |
| 207 | ENIYNN | 8111 | AAT | | QHFWGTPWT | 6866 |
| 212 | ENIYSN | 8112 | AAT | | QHFWGTPWT | 6871 |
| 248 | DHINNW | 8113 | GAT | | QQYWSTPLT | 6911 |
| 38 | QDINSY | 8114 | RAN | | LQYDEFPLT | 6682 |
| 39 | QDINGY | 8115 | RAN | | LQYDEFPPT | 6683 |
| 40 | QDINSY | 8116 | RAK | | LQYDEFPPT | 6684 |
| 41 | QDINGY | 8117 | RAN | | LQYDEFPPT | 6685 |
| 42 | QDINSY | 8118 | RAK | | LQYDEFPPT | 6686 |
| 43 | QDINSY | 8119 | RAN | | LHYDEFPPT | 6687 |
| 44 | QDINSY | 8120 | RAN | | LQYDEFPPT | 6688 |
| 45 | QDINSY | 8121 | RAN | | LQYDEFPPT | 6689 |
| 46 | QDINSY | 8122 | RAN | | LQYDEFPPT | 6690 |
| 47 | QDINSY | 8123 | RAN | | LQYDEFPPT | 6691 |
| 48 | QDINSY | 8124 | RAN | | LQYDEFPPT | 6692 |
| 49 | QDINSY | 8125 | RAN | | LQYDEFPPT | 6693 |
| 50 | QDINSY | 8126 | RAN | | LQYDEFPPT | 6694 |
| 51 | QDINSY | 8127 | RAN | | LQYDEFPPT | 6695 |
| 52 | QDINSY | 8128 | RAN | | LQYDEFPPT | 6696 |
| 53 | QDINSY | 8129 | RAN | | LQYDEFPPT | 6697 |
| 54 | QDINSY | 8130 | RAN | | LQYDEFPPT | 6698 |
| 55 | QDINSY | 8131 | RAN | | LQYDEFPPT | 6699 |
| 56 | QDINSY | 8132 | RAN | | LQYDEFPPT | 6700 |
| 91 | QDINSY | 8133 | RAN | | LQYDEFPLT | 6811 |
| 109 | QDINSY | 8134 | RAN | | LHYDEFPPT | 6664 |
| 110 | QDINSY | 8135 | RAN | | LQYDEFPPT | 6665 |
| 111 | QDINSY | 8136 | RAN | | LQYDEFPPT | 6666 |
| 112 | QDINSY | 8137 | RAN | | LQYDEFPPT | 6667 |
| 1 | QDINSY | 8138 | RAN | | LQYDEFPPT | 6668 |
| 113 | QDINSY | 8139 | RAN | | PQYVESPPT | 6669 |
| 114 | QDINSY | 8140 | RAN | | LQYDEFPPT | 6670 |
| 115 | QDINSY | 8141 | RAN | | LQYDEFPPT | 6671 |
| 23 | QDINSY | 8142 | RAN | | LQYDEFPPT | 6672 |
| 116 | QDINSY | 8143 | RAN | | LQYDEFPPT | 6673 |
| 117 | QDINSY | 8144 | RAN | | LQYDEFPLT | 6674 |
| 2 | QDINSY | 8145 | RAN | | LQYDEFPPT | 6675 |
| 118 | QDINGY | 8146 | RAN | | LQYDEFPPT | 6676 |
| 119 | QDINSY | 8147 | RAN | | LQYDEFPPT | 6677 |
| 120 | QDINSY | 8148 | RAN | | LQYDEFPPT | 6678 |
| 121 | QDINSY | 8149 | RAN | | LQYDEFPPT | 6679 |
| 122 | QDINSY | 8150 | RAN | | LQYDEFPPT | 6680 |
| 123 | QDINSY | 8151 | RAK | | LQYDEFPPT | 6681 |
| 124 | QDINSY | 8152 | RAN | | LQYDEFPPT | 6714 |
| 173 | QDINSY | 8153 | RAN | | LQYDEFPLT | 6810 |
| 193 | QDINSY | 8154 | RAN | | LQYDEFPPT | 6849 |
| 203 | QDINSY | 8155 | RAN | | LQYDEFPPT | 6862 |
| 70 | QDIVKN | 8156 | YAT | | LQFYEFPLT | 6749 |
| 87 | QDIVKN | 8157 | YAT | | LQFYEFPYT | 6797 |
| 89 | QDIVKN | 8158 | YAT | | LQFYEFPLT | 6803 |
| 99 | QDIVKN | 8159 | YAT | | LQFYEFPYT | 6833 |
| 100 | QDIVKN | 8160 | YAT | | LQFYEFPYT | 6834 |
| 16 | QDIVKN | 8161 | YAT | | LQFYEFPLT | 6745 |
| 141 | QDIVKN | 8162 | YAT | | LQFYEFPLT | 6746 |
| 142 | QDIVKN | 8163 | YAT | | LQFYEFPLT | 6747 |
| 143 | QDIVKN | 8164 | YAT | | LQFYEFPLT | 6748 |
| 31 | QDIVKN | 8165 | YAT | | LQFYEFPYT | 6796 |
| 168 | QDIVKN | 8166 | YAT | | LQFYEFPLT | 6802 |
| 35 | QDIVKN | 8167 | YAT | | LQFYEFPYT | 6832 |
| 239 | QDIVKN | 8168 | YAT | | LQFYEFPLT | 6902 |
| 21 | QNINVW | 8169 | KAS | | QQGQSYPLT | 6842 |
| 218 | QNINVW | 8170 | KAS | | QQGQSYPYT | 6877 |
| 106 | TDIDDD | 8171 | EGN | | LQSDNLPLT | 6885 |
| 197 | TDIDDD | 8172 | EGN | | LQSDNLPLT | 6855 |
| 22 | TDIDDD | 8173 | EGN | | LQSDNLPLT | 6858 |
| 224 | TDIDDD | 8174 | EGN | | LQSDNLPLT | 6884 |
| 95 | TDIDDD | 8175 | EGN | | LQSDNMPLT | 6825 |
| 157 | TDIDDD | 8176 | EGN | | LQSDNMPFT | 6778 |
| 27 | IDIDDD | 8177 | EGN | | LQSDNMPFT | 6779 |
| 33 | TDIDDD | 8178 | EGN | | LQSDNMPLM | 6821 |
| 180 | TDIDDD | 8179 | EGN | | LQSDNMPLT | 6824 |
| 216 | TDIDDD | 8180 | EGN | | LQSDNMPLT | 6875 |
| 228 | TDIDDD | 8181 | EGN | | LQSDNMPLT | 6889 |
| 24 | QDINKY | 8182 | YTS | | LQYDNLMYT | 6742 |
| 139 | QDINKY | 8183 | YTS | | LQYDILMYT | 6743 |
| 140 | QDINKY | 8184 | YTS | | LQYDILMYT | 6744 |
| 217 | QDINKY | 8185 | YTS | | LQYDNLYMYT | 7780 |
| 230 | QDINKY | 8186 | YTS | | LQYDNLRT | 7781 |
| 240 | ESVDNYGISF | 8187 | AAS | | QQSKEVPPT | 6903 |
| 252 | ESVDNYGISF | 8188 | AAS | | QQSKEVPPT | 6915 |
| 66 | QSVDYDGDSY | 8189 | AAS | | QQSNEDPLT | 6738 |
| 67 | QSVDYDGDSY | 8190 | AAS | | QQSNEDPLT | 6739 |
| 68 | QSVDYDGDSY | 8191 | AAS | | QQSNEDPLT | 6740 |
| 69 | QSVDYDGDSY | 8192 | AAS | | QQSNEDPLT | 6741 |
| 71 | QSVDYDGDSY | 8193 | AAS | | QQSNKDPLT | 6756 |
| 72 | QSVDYDGDSY | 8194 | AAS | | QQSNKDPLT | 6757 |
| 73 | QSVDYDGDSY | 8195 | AAS | | QQSNEDPLT | 6758 |
| 74 | QSVDYDGDSY | 8196 | AAS | | QQSNKDPFT | 6759 |
| 75 | QSVDYDGDSY | 8197 | AAS | | QQSNKDPFT | 6760 |
| 76 | QSVDYDGDSY | 8198 | AAS | | QQSNKDPFT | 6761 |
| 83 | QSVDYDGDSY | 8199 | AAS | | QQSNEDPLT | 6782 |
| 88 | QSVDYDGDSY | 8200 | AAS | | QQSNEDPWT | 6800 |
| 135 | QSVDYDGDSY | 8201 | AAS | | QQSNEDPLT | 6733 |
| 136 | QSVDYDGDSY | 8202 | AAS | | QQSNEDPLT | 6734 |
| 137 | QSVDYDGDSY | 8203 | AAS | | QQSNEDPLT | 6735 |
| 138 | QSVDYDGDSY | 8204 | AAS | | QQSNEDPLT | 6736 |
| 15 | QSVDYDGDSY | 8205 | AAS | | QQSNEDPLT | 6737 |
| 146 | QSVDYDGDSY | 8206 | AAS | | QQSNKDPLT | 6753 |
| 147 | QSVDYDGDSY | 8207 | AAS | | QQSNEDPLT | 6754 |
| 148 | QSVDYDGDSY | 8208 | AAS | | QQSNKDPFT | 6755 |
| 159 | QSVDYDGDSY | 8209 | AAS | | QQSNEDPLT | 6781 |
| 161 | QSVDYDGDSY | 8210 | AAS | | QQSNEDPPT | 6787 |
| 166 | QSVDYDGDSY | 8211 | AAS | | QQSNEDPWT | 6799 |
| 170 | QSVDYDGDSY | 8212 | AAS | | QQSNEDPPT | 6805 |
| 177 | QSVDYDGDSY | 8213 | VAS | | QQSHEDPRT | 6819 |
| 186 | QSVDYDGDSY | 8214 | AAS | | QQSNEDPLPT | 7776 |
| 225 | QSVDYDGDSY | 8215 | AAS | | QQSNEDPWT | 6886 |
| 236 | QSVDYDGDSY | 8216 | AAS | | QQSNEDPFT | 6897 |
| 233 | ETVDSYGYSF | 8217 | RAS | | QQSNEDPRT | 6894 |
| 77 | QSVSTSSYSY | 8218 | YAS | | QHSWEIPLT | 6765 |
| 78 | QSVSTSSYSY | 8219 | YAS | | QHSWEIPLT | 6766 |
| 79 | QSVSTSSYSY | 8220 | YAS | | QHSWEIPLT | 6767 |
| 149 | QSVSTSSYSY | 8221 | YAS | | QHSWEIPLT | 6762 |
| 150 | QSVSTSSYSY | 8222 | YAS | | QHSWEIPLT | 6763 |
| 26 | QSVSTSSYSY | 8223 | YAS | | QHSWEIPLT | 6764 |
| 246 | QSVSTSSYSY | 8224 | YAS | | QHSWEIPLT | 6909 |
| 105 | SSVNY | 8225 | YTS | | QQFTSSPST | 6883 |
| 25 | SSVNY | 8226 | YTS | | QQFTSSHT | 7768 |
| 144 | SSVNY | 8227 | YTS | | QQFTSSHT | 7769 |
| 145 | SSVNY | 8228 | YTS | | QQFTSSHT | 7770 |
| 190 | SSVNY | 8229 | YTS | | QQFTSSLT | 7777 |
| 223 | SSVNY | 8230 | YTS | | QQFTSSPST | 6882 |
| 32 | SSVSY | 8231 | DTS | | QQWSSYPLT | 6798 |
| 209 | SSVSY | 8232 | DTS | | QQWSTYPPIT | 7779 |
| 210 | SSVSY | 8233 | DTS | | QQWSSYPFT | 6869 |
| 221 | LSVSD | 8234 | DTS | | QQWSSYPFT | 6880 |
| 90 | SSVSY | 8235 | STS | | QQRSSFPYT | 6809 |
| 19 | SSVSY | 8236 | STS | | QQRSSFPYT | 6808 |
| 34 | SSVSY | 8237 | STS | | QQRSTYPT | 7775 |
| 198 | SSVSY | 8238 | STS | | QQRSSYPPT | 6856 |
| 64 | SSVSY | 8239 | DTS | | QQWSSNPLY | 6731 |
| 65 | SSVSY | 8240 | DTS | | QQWSSNPLY | 6732 |
| | SSVSY | 8241 | DTS | | QQWSSNPLT | 6901 |
| 131 | SSVSY | 8242 | DTS | | QQWSSNPLYT | 7763 |
| 132 | SSVSY | 8243 | DTS | | QQWSSNPHVHV | 7764 |
| 133 | SSVSY | 8244 | DTS | | QQWSSNPLYT | 7765 |
| 14 | SSVSY | 8245 | DTS | | QQWSSNPLYT | 7766 |
| 134 | SSVSY | 8246 | DTS | | QQWSSNPLYT | 7767 |
| 187 | SSVSY | 8247 | DTS | | QQWSSNPLT | 6843 |
| 199 | SSVSY | 8248 | DTS | | QQWSSNPLT | 6857 |
| 238 | SSVSY | 8249 | DTS | | QQWSSNPLT | 6900 |
| 243 | SSVSY | 8250 | DTS | | QQWSSNPLT | 6906 |
| 247 | SSVSY | 8251 | DTS | | QQWSSNPLT | 6910 |
| 251 | SSVSY | 8252 | DTS | | QQWSSNPPT | 6914 |
| 178 | SSVSY | 8253 | DTS | | FQGSGYPLT | 6820 |
| 219 | SSVSY | 8254 | LTS | | QQWSSNPPT | 6878 |
| 255 | SSISY | 8255 | DTS | | HQRSSYPT | 7785 |
| 211 | SSVSY | 8256 | ATS | | QQWSSNPYT | 6870 |
| 200 | SSVSSSY | 8257 | STS | | HQWSSYPPT | 6859 |
| 205 | SSVSSSY | 8258 | STS | | HQWSSYPPT | 6864 |
| 208 | SSVSSSY | 8259 | STS | | HQWSSYPPT | 6867 |
| 222 | SSVSSSY | 8260 | STS | | HQWSSYPPT | 6881 |
| 227 | SSVSSSY | 8261 | STS | | HQWSSYPPT | 6888 |
| 98 | QSISDY | 8262 | YAS | | QNGHSFPWT | 6831 |
| 104 | QSISDY | 8263 | YAS | | QNGHSFPYT | 6852 |
| 183 | QSISDY | 8264 | YAS | | QNGHSFPWT | 6830 |
| 195 | QSISDY | 8265 | YAS | | QNGHSFPYT | 6851 |
| 241 | QSISDY | 8266 | YAS | | QNGHSFPLT | 6904 |
| 226 | QSISNN | 8267 | YAS | | QQSNSWPFT | 6887 |
| 60 | ENVVTY | 8268 | GAS | | GQSYSYPFT | 6722 |
| 61 | ENVVTY | 8269 | GAS | | GQSYSYPFT | 6723 |
| 62 | ENVVTY | 8270 | GAS | | GQSYSYPFT | 6724 |
| 63 | ENVVTY | 8271 | GAS | | GQSYSYPFT | 6725 |
| 59 | QDINSY | 8272 | RAN | | LQYDEFPPT | 6721 |
| 125 | ENVVTY | 8273 | GAS | | GQSYSYPFT | 6715 |
| 126 | ENVVTY | 8274 | GAS | | GQSYSYPFT | 6716 |
| 127 | ENVVTY | 8275 | GAS | | GQSYSYPFT | 6717 |
| 128 | ENVVTY | 8276 | GAS | | GQSYSYPFT | 6718 |
| 129 | ENVVTY | 8277 | GAS | | GQSYSYLIHVR | 7761 |
| 130 | ENVVTY | 8278 | GAS | | GQSYSYLIHVR | 7762 |
| 232 | ENVGTY | 8279 | GAS | | GQSYSYPPT | 6893 |
| 93 | QDVGTA | 8280 | WAS | | QQYSSYPFT | 6815 |
| 175 | QDVGTA | 8281 | WAS | | QQYSSYPFT | 6814 |
| 192 | QDVGTA | 8282 | WAS | | QQYSSYPFT | 6848 |
| 213 | QDVSTA | 8283 | WAS | | QQHYSTPWT | 6872 |
| 94 | QSVSND | 8284 | YAS | | QQDYTSLPT | 6817 |
| 20 | QSVSND | 8285 | YAS | | QQDYTSLPT | 6816 |
| 244 | ESLYSSKHKVHY | 8286 | GAS | | AQFYSYPYT | 6907 |
| 253 | ESLYSSKHKVHY | 8287 | GAS | | AQFYSYPYT | 6916 |
| 85 | QSLLNSSNQKNY | 8288 | FAS | | QQHYSTPLT | 6791 |
| 18 | QSLLNSSNQKNY | 8289 | FAS | | QQHYSTPLT | 6790 |
| 160 | QSLLYSTNQKNY | 8290 | WAS | | QQYYSYPPWT | 7772 |
| 234 | QSLLYSTNQKNY | 8291 | WAS | | QQYYSYRT | 7782 |
| 171 | QDIGIS | 8292 | ATS | | LQYASSPYT | 6806 |
| 92 | QDIHGY | 8293 | ETS | | LQYASSPLT | 6813 |
| 103 | QEISGY | 8294 | AAS | | LQYASYPWT | 6840 |
| 174 | QDIHGY | 8295 | ETS | | LQYASSPLT | 6812 |
| 185 | QEISGY | 8296 | AAS | | LQYASYPWT | 6839 |
| 29 | TGAVTTSNY | 8297 | GTN | | ALWYSNHL | 7773 |
| 30 | TGAVTTSNY | 8298 | GTN | | ALWYSNHWV | 6788 |
| 167 | TGAVTTSNY | 8299 | GTN | | ALWYSNHWV | 6801 |
| 176 | TGAVTTSNY | 8300 | GTN | | ALWYSNHLV | 6818 |
| 191 | TGAVTTSNY | 8301 | STN | | TLWYSNHWV | 6847 |
| 196 | TGAVTTSNY | 8302 | GTN | | ALWYSNHWV | 6854 |
| 231 | TGAVTTSNY | 8303 | GTN | | VLWYSNHLV | 6892 |
| 80 | TGAVTTSNY | 8304 | GTS | | ALWYSTHYV | 6774 |
| 81 | TGAVTTSNY | 8305 | GTS | | ALWYSTHYV | 6775 |
| 82 | TGAVTTSNY | 8306 | GTS | | ALWYSTHYV | 6776 |
| 84 | TGAVTTSNY | 8307 | GTS | | ALWYSTHWV | 6785 |
| 102 | TGAVTTSNY | 8308 | GTS | | ALWYSTHYV | 6838 |
| 154 | TGAVTTSNY | 8309 | GTS | | ALWYSTHYV | 6771 |
| 155 | TGAVTTSNY | 8310 | GTS | | ALWYSTHYV | 6772 |
| 156 | TGAVTTSNY | 8311 | GTS | | ALWYSTHYV | 6773 |
| 158 | TGAVTTSNY | 8312 | GTS | | ALWYSTHY | 7771 |
| 28 | TGAVTTSNY | 8313 | GTS | | ALWYSTHWV | 6784 |
| 184 | TGAVTTSNY | 8314 | GTS | | ALWYSTHYV | 6837 |
| 254 | TGAVTTSNY | 8315 | GTS | | ALWYSTHYV | 6917 |
| 107 | SQHSTYT | 8316 | LKKDGSH | 8826 | GVGDTIKEQFVYV | 6899 |
| 169 | SQHSTYT | 8317 | LKKDGSH | 8827 | GVGDTIKEQFVFV | 7774 |
| 201 | SQHSTYT | 8318 | LKKDGSH | 8828 | GVGDTIKEQFVYV | 7778 |
| 237 | SQHSTYT | 8319 | LKKDGSH | 8829 | GVGDTIKEQFVYV | 7783 |
| 245 | SQHSTYT | 8320 | LKKDGSH | 8830 | GVGDTIKEQFVYV | 7784 |
| | HCDR1 | | HCDR2 | | HCDR3 | |
| 265 | GGTFSSYA | 11540 | INPSGGT | 11802 | ARDLGDPGMDV | 11409 |
| 266 | GGTFSNYA | 11541 | IDPSGGST | 11803 | ARDLGDMGMDV | 11410 |
| 267 | GGTFSNYA | 11542 | INPSGGST | 11804 | ARDVGDRGMDV | 11411 |
| 263 | GGTFSSYA | 11543 | INPSGGT | 11805 | ARDLGDPGMDV | 11412 |
| 268 | GSTFSGYY | 11544 | IDPNGGGT | 11806 | AKDIVHDGTEYFQH | 11413 |
| 269 | GYTFTSYY | 11545 | INPSGGST | 11807 | AKDIVHDGTEYFQH | 11414 |
| 270 | GGTFSSYA | 11546 | INPSGGST | 11808 | AREGRDHDAFDI | 11415 |
| 271 | GFTFTDYG | 11547 | INPSGGST | 11809 | AREGRSHDAFDI | 11416 |
| 272 | GYTFTGYY | 11548 | MNPHSGDT | 11810 | ARWVGTTEYYYYYYMDV | 11417 |
| 273 | GYTFTDYY | 11549 | IDPSGGST | 11811 | ATTAYYDFWSGYSMDV | 11418 |
| 274 | GYTFTSHY | 11550 | IDPSGGST | 11812 | ARDMDNWNTGYYYYMDV | 11419 |
| 275 | GGTFSSYA | 11551 | VNPNSGDT | 11813 | ARDQRGGDAWDV | 11420 |
| 276 | GGTFSNYA | 11552 | ITPSGGST | 11814 | ARDTAGHFDI | 11421 |
| 277 | GGTFRNDV | 11553 | MNPNSGNT | 11815 | ARDNPDLDGMDV | 11422 |
| 278 | GGTFSSYA | 11554 | ISAYNGNT | 11816 | ARDLVGHFDY | 11423 |
| 279 | GGTFSSYA | 11555 | INPNSGGT | 11817 | ARDGYSGSYSD | 11424 |
| 264 | GGTFSSYA | 11556 | INPNSGGT | 11818 | ARDGYSGSYSD | 11425 |
| 257 | GGTFSSYA | 11557 | INPNSGGT | 11819 | ARDGYSGSYSD | 11426 |
| 280 | GNTLSSHA | 11558 | INPSGGST | 11820 | ARDQGSSGTFDY | 11427 |
| 281 | GGTLSSYA | 11559 | INPNSGGT | 11821 | ARDSTDVIDY | 11428 |
| 282 | GYIFTSYD | 11560 | INPNSGDT | 11822 | ARDGGTVTPTEEYYYYG- | 11429 |
| | | | | | MDV | |
| 283 | GGTFSSYA | 11561 | ISVYNGNT | 11823 | ASLDDLDY | 11430 |
| 284 | GHTFTSYY | 11562 | INPNNGGT | 11824 | ARDMVRDSAEYFQH | 11431 |
| 285 | GYTFITSY | 11563 | INPSGGTT | 11825 | ARDSSGYPIDY | 11432 |
| 286 | GYTFTSYD | 11564 | IIPLSGAP | 11826 | ARGALYNWNDGWFDP | 11433 |
| 258 | GYTFTSYD | 11565 | IIPLSGAP | 11827 | ARGALYNWNDGWFDP | 11434 |
| 287 | GFTVGSWY | 11566 | IWYEGSNK | 11828 | ARLGTASLPYFDY | 11435 |
| 288 | GYTFTGYY | 11567 | INPNRGDT | 11829 | ARESGDGFDP | 11436 |
| 289 | GYTFTNYY | 11568 | MNPNSGNT | 11830 | ARDWPNWFDP | 11437 |
| 290 | GYSFTDNY | 11569 | IRSDNGET | 11831 | AREVQLVGFDY | 11438 |
| 291 | GYTFSDHH | 11570 | IIPIFGTA | 11832 | ARGSSWYLHFQH | 11439 |
| 260 | GYTFSDHH | 11571 | IIPIFGTA | 11833 | ARGSSWYLHFQH | 11440 |
| 292 | GGTFSSYA | 11572 | IIPIFGTT | 11834 | AKGVDRYNWNDAFDY | 11441 |
| 293 | GYTFTDYY | 11573 | IHSNSGGT | 11835 | ARESSGYDSSLDY | 11442 |
| 294 | GGTFSSYG | 11574 | INPNSGDT | 11836 | TTDPRLDSSDPGY | 11443 |
| 295 | GGTFGNYG | 11575 | ISAYNGNT | 11837 | ARGGMDV | 11444 |
| 296 | GGTFSRYG | 11576 | SYPSDGST | 11838 | ARDRLGDLDY | 11445 |
| 261 | GGTFSRYG | 11577 | SYPSDGST | 11839 | ARDRLGDLDY | 11446 |
| 297 | GGTFSSYA | 11578 | MNPNSGNT | 11840 | ARDSIVGGYPFDY | 11447 |
| 298 | GYTFTSYD | 11579 | ITPIFGTT | 11841 | AREGYSSSWHDDAFDI | 11448 |
| 299 | GGTFSNYA | 11580 | IDPSGGST | 11842 | ARDLGDYGLDS | 11449 |
| 300 | GYTFTGYY | 11581 | MNPNSGDT | 11843 | ATGGSDSSGYYYEGYFQH | 11450 |
| 301 | GGTFSSYA | 11582 | MSPNSGNT | 11844 | ARDKGGYYDSSGYYWY | 11451 |
| 302 | GFSLSSYE | 11583 | ISSNGGST | 11845 | ARVGDGDGYNPDFDY | 11452 |
| 303 | GYTFTSYG | 11584 | IDPTSGAT | 11846 | AKDPIVATEVDY | 11453 |
| 304 | GGTFSSYA | 11585 | MSPNSGNT | 11847 | ARDSGAFDI | 11454 |
| 305 | GVTISNYA | 11586 | MNPNSGNT | 11848 | AREGLLDAFDI | 11455 |
| 306 | GGTFSRYG | 11587 | MNPYDGNT | 11849 | ARGGRHHDAFDI | 11456 |
| 307 | GGTFSSYA | 11588 | INPSGDGT | 11850 | ARDISNDAFDI | 11457 |
| 308 | GYILTGHY | 11589 | ISAYNGDT | 11851 | ARGSSWDDAFDI | 11458 |
| 309 | GFTFSNHY | 11590 | IGAGGGT | 11852 | AREGWNDDVFDI | 11459 |
| 310 | GGTFSSYA | 11591 | INPSAGTT | 11853 | ARDGNFGAFDI | 11460 |
| 311 | GYSFTTYA | 11592 | IIPIFGTA | 11854 | ARDKSGWNYGSGSYN- | 11461 |
| | | | | | DAFDI | |
| 312 | GYAFTGYY | 11593 | MNPNSGKT | 11855 | ARDGGLDFDY | 11462 |
| 313 | GYTFTTYY | 11594 | MNPNTGDT | 11856 | AKDPAVTPDAFDI | 11463 |
| 314 | GGTLSSYA | 11595 | IDPSGGGT | 11857 | AGSLYYYGMDV | 11464 |
| 315 | GGTFGSSA | 11596 | IIPIFGTA | 11858 | AKEDDILPPRAFDI | 11465 |
| 316 | GFTFDDYA | 11597 | ISGGGGVT | 11859 | ARVYSSGWLDAFDI | 11466 |
| 317 | GGTFSSYA | 11598 | ISGYNGNT | 11860 | ASSDVSPDAFDI | 11467 |
| 318 | GGTQNIYA | 11599 | VNPNSGNT | 11861 | ATPTSSSDDAFDI | 11468 |
| 319 | GGTFSSYA | 11600 | INPNSGGT | 11862 | ARASRGDDAFDI | 11469 |
| 320 | GIPFTSDD | 11601 | INPSGGST | 11863 | ARERYEGGY- | 11470 |
| | | | | | SSGPGNYYYGMDV | |
| 321 | GGTFSNYA | 11602 | MNPNSGNT | 11864 | ARDDDYGDYPV | 11471 |
| 322 | GDTFSDHA | 11603 | MNPKIGNT | 11865 | VYDSSGYDAFDI | 11472 |
| 323 | GYTFTSYD | 11604 | INPGTGGT | 11866 | ARETPSDYYDSSGYYYN- | 11473 |
| | | | | | DAFDI | |
| 324 | GGTFSSYA | 11605 | IPSGGT | 11867 | ARDLGTTFDI | 11474 |
| 325 | GYTFTAYY | 11606 | INPDNDNA | 11868 | AKDIAVAALAYGMDV | 11475 |
| 326 | GFTFSSYA | 11607 | ISYDGSDQ | 11869 | ARQSLYYYYGMDV | 11476 |
| 327 | GYTFTDYY | 11608 | ISTFTGNT | 11870 | ARDAPLAAAGTDYYYG- | 11477 |
| | | | | | MDV | |
| 262 | GYTFTDYY | 11609 | ISTFTGNT | 11871 | ARDAPLAAAGTDYYYG- | 11478 |
| | | | | | MDV | |
| 328 | GFTFSSYA | 11610 | ISDDGITK | 11872 | ARDDSSGYGGMDV | 11479 |
| 329 | GFTFSSYA | 11611 | ISYDGGDK | 11873 | ASGSLVLGYYYMDV | 11480 |
| 330 | GYTFTNYY | 11612 | INPNTGGT | 11874 | ATGGGGSYYDAFDV | 11481 |
| 331 | GGTFSSYA | 11613 | INPNSGNT | 11875 | ARDIGEGYSMDV | 11482 |
| 332 | GFTFSNHY | 11614 | ISYDGSNK | 11876 | AREEKYSSSWYVGVDAFDI | 11483 |
| 333 | GFTFSSSA | 11615 | ISGSGDNA | 11877 | ARDQEDYYYDSSGYGMDV | 11484 |
| 334 | GGTFSSHA | 11616 | IIPIFGTA | 11878 | AKGDWGIVVVPAAIGAFDI | 11485 |
| 335 | GYTFTAYY | 11617 | ISPVFGST | 11879 | ARDLGYYDSSGYRYDAFDI | 11486 |
| 336 | GYTFTSYD | 11618 | ISPMFGTA | 11880 | AKDGWYYGMDV | 11487 |
| 337 | GGTFSSYG | 11619 | INPNSGGT | 11881 | ARGEAGNLDWYFDL | 11488 |
| 338 | GGTFSNYG | 11620 | INPNNGDT | 11882 | AREDVWYFDL | 11489 |
| 339 | GYTFTTYG | 11621 | ISTYDGKT | 11883 | ALHLGGDWYFDL | 11490 |
| 340 | GYTFTGYY | 11622 | INPNTGAT | 11884 | ARQHGDYDWYFDL | 11491 |
| 341 | GDTFTTYY | 11623 | INPNSGNT | 11885 | ARDSGRH | 11492 |
| 342 | GGTFSSYG | 11624 | IIPMLGIA | 11886 | VREEVAGANWFDP | 11493 |
| 343 | GYTFTSYA | 11625 | INPSGGST | 11887 | AREGDYGSGEFDY | 11494 |
| 344 | GYTFTSSY | 11626 | MNPRSGNT | 11888 | ARERDDYGDYGWLDY | 11495 |
| 345 | GYTFTGYY | 11627 | INPSGGST | 11889 | ARDLYDSSGY- | 11496 |
| | | | | | WHYYYYMDV | |
| 346 | GGTFSSYA | 11628 | INPNSGGT | 11890 | ARFSGYDYVDY | 11497 |
| 347 | GGTFSSYA | 11629 | INPNGGNT | 11891 | ARDVGEDFDL | 11498 |
| 348 | GYTFTSYY | 11630 | INPADGDT | 11892 | ARDFDWLFAMDV | 11499 |
| 349 | GGTFSNYA | 11631 | INPNGGTT | 11893 | AKHGDHGFYV | 11500 |
| 350 | GGTFSSYA | 11632 | INPNVGSA | 11894 | AREDSGTSWFDP | 11501 |
| 351 | GYTFTSYY | 11633 | INPSDGST | 11895 | ARDDRGSNYYYGMDV | 11502 |
| 352 | GYTFTAYY | 11634 | MNPNSGTT | 11896 | ARDSSDYYGDYRADAFDI | 11503 |
| 353 | GYTFTSYD | 11635 | ISPSGDAT | 11897 | VKGLDH | 11504 |
| 354 | GFSFSDYG | 11636 | IGGIGDST | 11898 | ARMNYGDSNYYYYYG- | 11505 |
| | | | | | MDV | |
| 355 | GYTFTSYD | 11637 | ISPSDGST | 11899 | ARGAVGFDY | 11506 |
| 356 | GYTFTSYG | 11638 | INTYSGYT | 11900 | TTDDFLSFGY | 11507 |
| 357 | GYMFTDYY | 11639 | IIPYFGTA | 11901 | ARSISGSYVLDAFDI | 11508 |
| 358 | GYTFNSYG | 11640 | IIPIFGTA | 11902 | ARDWGYGDYADDAFDI | 11509 |
| 359 | GGTFSNND | 11641 | INPIYGSA | 11903 | AADWRGFDY | 11510 |
| 360 | GYTFTEYA | 11642 | MNPHNGDT | 11904 | AREGDYLGYPIDC | 11511 |
| 361 | GFTFSDYS | 11643 | IWQDGNVK | 11905 | ARDGNSGYVF | 11512 |
| 362 | GYTFTTYY | 11644 | INPNTGDT | 11906 | ARTAEAVAGLPAFDY | 11513 |
| 363 | GGTSNNYA | 11645 | IIPLFGTT | 11907 | ARVTLYGDYDY | 11514 |
| 364 | GYSLITHW | 11646 | INPSDGVT | 11908 | AREYYGEGFDY | 11515 |
| 259 | GYSLITHW | 11647 | INPSDGVT | 11909 | AREYYGEGFDY | 11516 |
| 365 | GGTFSSYA | 11648 | INPSGGST | 11910 | ARDLGDTAMDG | 11517 |
| 366 | GYTFTSYY | 11649 | ITPSGGST | 11911 | ARDGGLASFDY | 11518 |
| 367 | GGTFSSYA | 11650 | MNPNSGNT | 11912 | ARGGGWAMTDAFDI | 11519 |
| 368 | GFTFDDYG | 11651 | IYSGGDT | 11913 | TRKEYYYDSSGYLRLFDY | 11520 |
| 369 | GYTFTDYY | 11652 | INPIFGTS | 11914 | ARDISGYDYYYYGMDV | 11521 |
| 370 | GGTLNNYA | 11653 | IDPSDGTI | 11915 | ARSDYDFWSGLGGYFDY | 11522 |
| 371 | GGTFSSYA | 11654 | IDPNSGGT | 11916 | ARDSAEWELGGSFDY | 11523 |
| 372 | GFTFSNHY | 11655 | IGVNGDT | 11917 | AREGLVFSGRGHWYFDL | 11524 |
| 373 | GGTFSNYA | 11656 | INPNGGNT | 11918 | ARDYEDADFDG | 11525 |
| 374 | GYTFSDHH | 11657 | MNPDSGNT | 11919 | ARDSTSGVDY | 11526 |
| 375 | GFTFSSYA | 11658 | ISYDGHDQ | 11920 | ARGEQQLEGFYYYYGMDV | 11527 |
| 376 | GFTFSSYW | 11659 | ISYDGSKE | 11921 | ASDYGDYGTYDY | 11528 |
| 377 | GFTFSSYW | 11660 | ISGGGDDT | 11922 | AREPLAYCGGDCPGGFDY | 11529 |
| 378 | GFTFSDHY | 11661 | IGTGGDT | 11923 | ARHEDTAIFLDY | 11530 |
| 379 | GYTFTSYY | 11662 | ISPSDGST | 11924 | ARDGYDAWSYGMDV | 11531 |
| 380 | GYTFTGYY | 11663 | MNPNSGNT | 11925 | ARDGVTGTDY | 11532 |
| 381 | GFAFSSYV | 11664 | ISGAGDST | 11926 | AREPTTVTDDWYFDL | 11533 |
| 382 | GFAFSSHW | 11665 | ISGNGDNS | 11927 | ARDRAPEYFDL | 11534 |
| 383 | GGTFSSYA | 11666 | INPNSGGT | 11928 | ARDDYGDYGGGMDV | 11535 |
| 384 | GYTFTDYY | 11667 | MNPNSGHT | 11929 | AKDTSPRYGDGFFDY | 11536 |
| 385 | GFTFSSYW | 11668 | TSYDGSNK | 11930 | ARESGFSAEYFQH | 11537 |
| 386 | GGTFSSYA | 11669 | INPSGGST | 11931 | ARATGLYCSGSCFDY | 11538 |
| 388 | RSILDFNA | 14122 | IARAGAT | 14123 | NARVFDLPNDY | 14124 |
| | LCDR1 | | LCDR2 | | LCDR3 | |
| 265 | QDISNY | 13364 | DAS | | QQSYSTPLT | 12714 |
| 266 | QSISSY | 13365 | AAS | | QQSYSTPLT | 12715 |
| 267 | QDISNY | 13366 | KAS | | QQSFSSPLT | 12716 |
| 263 | QDISNY | 13367 | DAS | | QQSYSTPLT | 12717 |
| 268 | QNVNTW | 13368 | EAS | | QQANSFPFT | 12718 |
| 269 | QSISDW | 13369 | AAS | | AQHNHYPYT | 12719 |
| 272 | QAIRDD | 13370 | DAS | | QQANSFPIT | 12722 |
| 273 | QGVGND | 13371 | AAS | | QQASSFPLT | 12723 |
| 274 | QIIGTN | 13372 | AAS | | QQSYTFPVT | 12724 |
| 275 | QSISTW | 13373 | DAS | | QQSYSTPFT | 12725 |
| 281 | QDIRNY | 13374 | DAS | | QQAYSFPWT | 12733 |
| 282 | QDISNY | 13375 | NAS | | QQLNSYPFT | 12734 |
| 283 | QSISTW | 13376 | AAS | | LOHYTYPLT | 12735 |
| 284 | EDISTY | 13377 | AAS | | QQSHTIPWT | 12736 |
| 285 | HHISDF | 13378 | AAS | | QQSYSSPYT | 12737 |
| 286 | QDIGDY | 13379 | DAS | | QQANSFPLT | 12738 |
| 258 | QDIGDY | 13380 | DAS | | QQANSFPLT | 12739 |
| 287 | QDIRSY | 13381 | AAS | | QQSYTAPPT | 12740 |
| 288 | QDISNN | 13382 | AAS | | LOHNTYPLT | 12741 |
| 289 | QDISNW | 13383 | DAS | | QQAISFPLT | 12742 |
| 290 | QGIANY | 13384 | AAS | | QQADSFPLT | 12743 |
| 291 | QGIASY | 13385 | AAS | | QQFDSYPIT | 12744 |
| 260 | QGIASY | 13386 | AAS | | QQFDSYPIT | 12745 |
| 292 | QGISNY | 13387 | AAS | | QQSSIIPFT | 12746 |
| 293 | QGISNY | 13388 | AAS | | QQAYSFPYT | 12747 |
| 294 | QSIGRW | 13389 | DAS | | QQSYSTPRT | 12748 |
| 295 | QSINSW | 13390 | DTS | | QQTYSTPYT | 12749 |
| 296 | QSISSW | 13391 | AAS | | QQGYSTPYI | 12750 |
| 261 | QSISSW | 13392 | AAS | | QQGYSTPYI | 12751 |
| 297 | QSISSY | 13393 | AAS | | QQTDSIPIT | 12752 |
| 298 | QSISSY | 13394 | AAS | | QQSYSIPYT | 12753 |
| 299 | QTIRSY | 13395 | KAS | | QQTYTIPIT | 12754 |
| 300 | QTISNW | 13396 | AAS | | QQANSFPPT | 12755 |
| 301 | QYIGSY | 13397 | DAS | | QQVDSYPLT | 12756 |
| 307 | QDIGNY | 13398 | AAS | | QQTYNTPLT | 12762 |
| 308 | QDISNY | 13399 | EAS | | QQSYSTPFT | 12763 |
| 309 | QDISTW | 13400 | RAS | | QQSYSIPLT | 12764 |
| 310 | QNINNY | 13401 | AAS | | QQSYSAPVT | 12765 |
| 311 | QNINTW | 13402 | AAS | | QQAYSFPFT | 12766 |
| 312 | QRIGNY | 13403 | AAS | | QQSYSTPLT | 12767 |
| 313 | QSISTY | 13404 | AAS | | QQSYRTVT | 12768 |
| 324 | QDISNY | 13405 | AAS | | QQSYSTPT | 12779 |
| 325 | QDISNY | 13406 | GAS | | QEADSFPLT | 12780 |
| 326 | QGIRND | 13407 | DAS | | QQAYSFPWT | 12781 |
| 327 | QGISNY | 13408 | KAS | | QQSYNTPFT | 12782 |
| 262 | QGISNY | 13409 | KAS | | QQSYNTPFT | 12783 |
| 328 | QSINRW | 13410 | SAS | | QQSYNTPLT | 12784 |
| 329 | QSINTW | 13411 | AAS | | QQANSFPFT | 12785 |
| 330 | QSIRTW | 13412 | DAS | | QQLNSYPLT | 12786 |
| 331 | QSIRTY | 13413 | AAS | | QQSYSAPLT | 12787 |
| 332 | QSISTY | 13414 | AAS | | QQSYSTPLT | 12788 |
| 333 | QSITTY | 13415 | AAS | | QQSYSTPLT | 12789 |
| 339 | QSISSW | 13416 | DAS | | QQSYSTPFT | 12795 |
| 340 | QSISSY | 13417 | DAS | | QQSYSFPT | 12796 |
| 344 | QDISNY | 13418 | AAA | | QQTYSTPWT | 12800 |
| 345 | QDINTY | 13419 | AAS | | QQSSSFPLT | 12801 |
| 346 | QDISNY | 13420 | AAS | | QQLYNFPYT | 12802 |
| 347 | QSISRY | 13421 | GAS | | QQSYNTPLT | 12803 |
| 348 | QTLSGW | 13422 | GAS | | QQYYSYPPT | 12804 |
| 349 | QDIINY | 13423 | EAS | | QQSYSTPLT | 12805 |
| 350 | QSISSY | 13424 | DVF | | QQSYSSPFT | 12806 |
| 351 | QDISNY | 13425 | MAS | | QQTNSFPLT | 12807 |
| 352 | QSISSY | 13426 | DAS | | QQSYSTPLT | 12808 |
| 356 | ESVSTW | 13427 | KAS | | QQSYKTPYT | 12812 |
| 358 | QSISSY | 13428 | AAS | | QQSYSTPYT | 12814 |
| 360 | QSISSY | 13429 | KAS | | QQNDSIPIT | 12816 |
| 361 | QSISRW | 13430 | DAS | | LODYSYPLT | 12817 |
| 363 | QSINRY | 13431 | AAS | | QQANSFPPT | 12819 |
| 364 | QGISNY | 13432 | SAS | | QQSYSTPLT | 12820 |
| 259 | QGISNY | 13433 | SAS | | QQSYSTPLT | 12821 |
| 365 | QSIDSY | 13434 | KAS | | QQSYSAPLT | 12822 |
| 366 | QDISTW | 13435 | DAS | | QQVNSDPYT | 12823 |
| 367 | QDISNY | 13436 | AAS | | QQGDSLPLT | 12824 |
| 368 | QGISNY | 13437 | AAS | | QQSDSFPYT | 12825 |
| 370 | QGIRND | 13438 | AAS | | QQANSFPPT | 12827 |
| 371 | ESISTY | 13439 | KAS | | QQTDSTFIT | 12828 |
| 372 | RNIHDY | 13440 | AAS | | QQTYSTPPT | 12829 |
| 373 | QSNDSY | 13441 | KAS | | QQSYSSPLT | 12830 |
| 374 | QSISDF | 13442 | AAS | | QQSYSSPYT | 12831 |
| 375 | QDISNY | 13443 | AAS | | QQANRFPLT | 12832 |
| 376 | QDISNY | 13444 | KAS | | QQSYNFPAT | 12833 |
| 378 | QSISSY | 13445 | DAS | | QQSYSTPLT | 12835 |
| 379 | QGISDY | 13446 | DAS | | QQSYILPLT | 12836 |
| 380 | QDINDF | 13447 | AAS | | QQSYSAPYT | 12837 |
| 381 | QSISNW | 13448 | AAS | | QQSYSSPWT | 12838 |
| 382 | QGIDSW | 13449 | AAS | | QQAYSFPLT | 12839 |
| 383 | QNIGTW | 13450 | RAS | | QQAYSFPWT | 12840 |
| 384 | QNINNW | 13451 | KAS | | QQADSFPPT | 12841 |
| 385 | QDISSY | 13452 | AAS | | QQLNRYPIT | 12842 |
| 386 | QDISNY | 13453 | AAS | | QQYDSSFIT | 12843 |
| 302 | QSLLHSNGYNY | 13454 | LGS | | MQGTHWPPT | 12757 |
| 303 | QSLLHSNGYNY | 13455 | FGS | | MQALQAPVS | 12758 |
| 316 | QSLLHSNGYNY | 13456 | DAS | | MQALQTPPA | 12771 |
| 334 | QSLLHSNGYNY | 13457 | AAS | | MQARQTPLT | 12790 |
| 335 | QSLLHSNGYNY | 13458 | GAS | | MQTLQTPFT | 12791 |
| 336 | QSLLHSNGYNY | 13459 | LGS | | MQALQTPLT | 12792 |
| 353 | QSLLHSNGYNY | 13460 | LGS | | MQALQSPWT | 12809 |
| 355 | QSLLHSNGYNY | 13461 | LGS | | MQALQTPPS | 12811 |
| 377 | QSLLHSNGYNY | 13462 | LGS | | MQGTHWPET | 12834 |
| 314 | QSVGSY | 13463 | GAS | | QQYDSSSQT | 12769 |
| 315 | RSVSTY | 13464 | GAS | | QQYDGSPYT | 12770 |
| 341 | QSVSSY | 13465 | DTS | | QQYYDTPYT | 12797 |
| 369 | QSVSTY | 13466 | GAS | | QQHDSYPLT | 12826 |
| 270 | QSVLSSSYNKNY | 13467 | WAS | | QQYYTTPFT | 12720 |
| 271 | QSVLSSSYNKNY | 13468 | WAS | | QQYYSTPFT | 12721 |
| 276 | QSVLSSSNNKNY | 13469 | WAS | | QQYYGSPLT | 12726 |
| 277 | QSVLSSSYNKNY | 13470 | WAS | | QQYYSSPPT | 12727 |
| 278 | QSVLSSSYNKNY | 13471 | WAS | | QQYYSSPPT | 12728 |
| 279 | QSVLSSSYNKNY | 13472 | WAS | | QQYYSTPWT | 12729 |
| 264 | QSVLSSSYNKNY | 13473 | WAS | | QQYYSTPWT | 12730 |
| 257 | QSVLSSSYNKNY | 13474 | WAS | | QQYYSTPWT | 12731 |
| 280 | QSVLSSSYNKNY | 13475 | WAS | | QQYYGSPPT | 12732 |
| 304 | QSVLSSSYNKNY | 13476 | WAS | | QQYYSTPLT | 12759 |
| 305 | QSVSSSSYNKNY | 13477 | WAS | | QQYYSTPIT | 12760 |
| 306 | QNVLSSSNNNSY | 13478 | WAS | | QQYYSTPFT | 12761 |
| 317 | QSVLSSSYNKNF | 13479 | WAS | | QQYYSAPPT | 12772 |
| 318 | QSVLSSSYNKNF | 13480 | WAS | | QQYYSDPIT | 12773 |
| 319 | QSVLSSSYNKNY | 13481 | WAS | | QQYYSIPIA | 12774 |
| 320 | QSVLSSSYNKNY | 13482 | WAS | | QQYYSIPYT | 12775 |
| 321 | QSVLSTSYNKNY | 13483 | WAS | | QQYYTTPPT | 12776 |
| 322 | QSVLSTSYNRNF | 13484 | WAS | | QQYYSTPYT | 12777 |
| 323 | QSVLYSSNNKNY | 13485 | WAS | | QQYYSTPLT | 12778 |
| 337 | QTVFSTSYNKNY | 13486 | WAS | | QQYYSTPLT | 12793 |
| 338 | QSVFSTSYNRDY | 13487 | WAS | | QQYYSSPPT | 12794 |
| 342 | QSVLYSSNNKNY | 13488 | LAS | | QQYYSTPPT | 12798 |
| 343 | QSVLSSSYNKNY | 13489 | WAS | | QQYYSTPLT | 12799 |
| 354 | QSVLYSSNNKNY | 13490 | WAS | | QQYYSSPLT | 12810 |
| 357 | QSVLYSSNNKNY | 13491 | WAS | | QQYFTTPLT | 12813 |
| 359 | QSVLSSSYNKNY | 13492 | WAS | | QQYYDTPLT | 12815 |
| 362 | QSVFSTSYNRDY | 13493 | WAS | | QQYYYTST | 12818 |

TABLE 25
G and F Proteins

| SEQ ID | | |
|---|---|---|
| NO: | SEQUENCE | ANNOTATION |
| 9258 | MVVILDKRCY CNLLILILMI SECSVGILHY | Nipah virus NiV-F |
| | EKLSKIGLVK GVTRKYKIKS NPLIKDIVIK | with signal sequence |
| | MIPNVSNMSQ CTGSVMENYK TRLNGILTPI | (aa 1-546) |
| | KGALEIYKNN THDLVGDVRL AGVIMAGVAI | Uniprot Q9IH63 |
| | GIATAAQITA GVALYEAMKN ADNINKLKSS | |
| | IESTNEAVVK LQETAEKTVY VLTALQDYIN | |
| | TNLVPTIDKI SCKQTELSLD LALSKYLSDL | |
| | LFVFGPNLQD PVSNSMTIQA ISQAFGGNYE | |
| | TLLRTLGYAT EDFDDLLESD SITGQIIYVD | |
| | LSSYYIIVRV YFPILTEIQQ AYIQELLPVS | |
| | FNNDNSEWIS IVPNFILVRN TLISNIEIGF | |
| | CLITKRSVIC NQDYATPMIN NMRECLTGST | |
| | EKCPRELVVS SHVPRFALSN GVLFANCISV | |
| | TCQCQTTGRA ISQSGEQTLL MIDNTTCPTA | |
| | VLGNVIISLG KYLGSVNYNS EGIAIGPPVF | |
| | TDKVDISSQI SSMNQSLQQS KDYIKEAQRL | |
| | LDTVNPSLIS MLSMIILYVL SIASLCIGLI | |
| | TFISFIIVEK KRNTYSRLED RRVRPTSSGD LYYIGT | |
| 9259 | ILHY EKLSKIGLVK GVTRKYKIKS NPLTKDIVIK | Nipah virus NiV-F F0 |
| | MIPNVSNMSQ CTGSVMENYK TRLNGILTPI | (aa 27-546) |
| | KGALEIYKNN THDLVGDVRL AGVIMAGVAI | |
| | GIATAAQITA GVALYEAMKN ADNINKLKSS | |
| | IESTNEAVVK LQETAEKTVY VLTALQDYIN | |
| | TNLVPTIDKI SCKQTELSLD LALSKYLSDL | |
| | LFVFGPNLQD PVSNSMTIQA ISQAFGGNYE | |
| | TLLRTLGYAT EDEDDLLESD SITGQIIYVD | |
| | LSSYYIIVRV YFPILTEIQQ AYIQELLPVS | |
| | FNNDNSEWIS IVPNFILVRN TLISNIEIGF | |
| | CLITKRSVIC NQDYATPMIN NMRECLTGST | |
| | EKCPRELVVS SHVPRFALSN GVLFANCISV | |
| | TCQCQTTGRA ISQSGEQTLL MIDNTTCPTA | |
| | VLGNVIISLG KYLGSVNYNS EGIAIGPPVF | |
| | TDKVDISSQI SSMNQSLQQS KDYIKEAQRL | |
| | LDTVNPSLIS MLSMIILYVL SIASLCIGLI | |
| | TFISFIIVEK KRNTYSRLED RRVRPTSSGD LYYIGT | |
| 9260 | ILHYEKLSKIGLVKGVTRKYKIKSNPLTKDIVIKMIPNVS | Nipah virus NiV-F F2 |
| | NMSQCTGSVMENYKTRLNGILTPIKGALEIYKNNTHDLVG | (aa 27-109) |
| | DVR | |
| 9261 | LAGVIMAGVAIGIATAAQITAGVALYEAMKNADNINKLKS | Nipah virus NiV F F1 |
| | SIESTNEAVVKLQETAEKTVYVLTALQDYINTNLVPTIDK | (aa 110-546) |
| | ISCKQTELSLDLALSKYLSDLLFVFGPNLQDPVSNSMTIQ | |
| | AISQAFGGNYETLLRTLGYATEDFDDLLESDSITGQIIYV | |
| | DLSSYYIIVRVYFPILTEIQQAYIQELLPVSFNNDNSEWI | |
| | SIVPNFILVRNTLISNIEIGFCLITKRSVICNQDYATPMT | |
| | NNMRECLIGSTEKCPRELVVSSHVPRFALSNGVLFANCIS | |
| | VTCQCQTTGRAISQSGEQTLLMIDNTTCPTAVLGNVIISL | |
| | GKYLGSVNYNSEGIAIGPPVFTDKVDISSQISSMNQSLQQ | |
| | SKDYIKEAQRLLDTVNPSLISMLSMIILYVLSIASLCIGL | |
| | ITFISFIIVEKKRNTYSRLEDRRVRPTSSGDLYYIGT | |
| 9262 | ILHY EKLSKIGLVK GVTRKYKIKS NPLTKDIVIK | Nipah virus NiV-F F0 |
| | MIPNVSNMSQ CTGSVMENYK TRLNGILTPI | (aa T234 truncation |
| | KGALEIYKNN THDLVGDVRL AGVIMAGVAI | 525-544) |
| | GIATAAQITA GVALYEAMKN ADNINKLKSS | |
| | IESTNEAVVK LQETAEKTVY VLTALQDYIN | |
| | TNLVPTIDKI SCKQTELSLD LALSKYLSDL | |
| | LFVFGPNLQD PVSNSMTIQA ISQAFGGNYE | |
| | TLLRTLGYAT EDFDDLLESD SITGQIIYVD | |
| | LSSYYIIVRV YFPILTEIQQ AYIQELLPVS | |
| | FNNDNSEWIS IVPNFILVRN TLISNIEIGE | |
| | CLITKRSVIC NQDYATPMIN NMRECLTGST | |
| | EKCPRELVVS SHVPRFALSN GVLFANCISV | |
| | TCQCQTTGRA ISQSGEQTLL MIDNTTCPTA | |
| | VLGNVIISLG KYLGSVNYNS EGIAIGPPVF | |
| | TDKVDISSQI SSMNQSLQQS KDYIKEAQRL | |
| | LDTVNPSLIS MLSMIILYVL SIASLCIGLI | |
| | TFISFIIVEK KRNTGT | |
| 9263 | LAGVIMAGVAIGIATAAQITAGVALYEAMKNADNINKLKS | Nipah virus NiV F F1 |
| | SIESTNEAVVKLQETAEKTVYVLTALQDYINTNLVPTIDK | (aa 110-546) |
| | ISCKQTELSLDLALSKYLSDLLFVFGPNLQDPVSNSMTIQ | truncation |
| | AISQAFGGNYETLLRTLGYATEDFDDLLESDSITGQIIYV | (aa 525-544) |
| | DLSSYYIIVRVYFPILTEIQQAYIQELLPVSFNNDNSEWI | |
| | SIVPNFILVRNTLISNIEIGFCLITKRSVICNQDYATPMT | |
| | NNMRECLTGSTEKCPRELVVSSHVPRFALSNGVLFANCIS | |
| | VTCQCQTTGRAISQSGEQTLLMIDNTTCPTAVLGNVIISL | |
| | GKYLGSVNYNSEGIAIGPPVFTDKVDISSQISSMNQSLQQ | |
| | SKDYIKEAQRLLDTVNPSLISMLSMIILYVLSIASLCIGL | |
| | ITFISFIIVEKKRNTGT | |
| 9264 | ILHY EKLSKIGLVK GVTRKYKIKS NPLTKDIVIK | Nipah virus NiV-F F0 |
| | MIPNVSNMSQ CTGSVMENYK TRINGILIPI | T234 truncation (aa |
| | KGALEIYKNQ THDLVGDVRL AGVIMAGVAI | 525-544) AND |
| | GIATAAQITA GVALYEAMKN ADNINKLKSS | mutation on N-linked |
| | IESTNEAVVK LQETAEKTVY VLTALQDYIN | glycosylation site |
| | TNLVPTIDKI SCKQTELSLD LALSKYLSDL | |
| | LFVFGPNLQD PVSNSMTIQA ISQAFGGNYE | |
| | TLLRTLGYAT EDFDDLLESD SITGQIIYVD | |
| | LSSYYIIVRV YFPILTEIQQ AYIQELLPVS | |
| | FNNDNSEWIS IVPNFILVRN TLISNIEIGE | |
| | CLITKRSVIC NQDYATPMIN NMRECLIGST | |
| | EKCPRELVVS SHVPRFALSN GVLFANCISV | |
| | TCQCQTTGRA ISQSGEQTLL MIDNTTCPTA | |
| | VLGNVIISLG KYLGSVNYNS EGIAIGPPVF | |
| | TDKVDISSQI SSMNQSLQQS KDYIKEAQRL | |
| | LDTVNPSLIS MLSMIILYVL SIASLCIGLI | |
| | TFISFIIVEK KRNTGT | |
| 9265 | MVVILDKRCY CNLLILILMI SECSVGILHY | Truncated NiV fusion |
| | EKLSKIGLVK GVTRKYKIKS NPLTKDIVIK | glycoprotein |
| | MIPNVSNMSQ CTGSVMENYK TRLNGILTPI | (FcDelta22) at |
| | KGALEIYKNN THDLVGDVRL AGVIMAGVAI | cytoplasmic tail |
| | GIATAAQITA GVALYEAMKN ADNINKLKSS | (with signal sequence) |
| | IESTNEAVVK LQETAEKTVY VLTALQDYIN | |
| | TNLVPTIDKI SCKQTELSLD LALSKYLSDL | |
| | LFVFGPNLQD PVSNSMTIQA ISQAFGGNYE | |
| | TLLRTLGYAT EDFDDLLESD SITGQIIYVD | |
| | LSSYYIIVRV YFPILTEIQQ AYIQELLPVS | |
| | FNNDNSEWIS IVPNFILVRN TLISNIEIGF | |
| | CLITKRSVIC NQDYATPMTN NMRECLTGST | |
| | EKCPRELVVS SHVPRFALSN GVLFANCISV | |
| | TCQCQTTGRA ISQSGEQTLL MIDNTTCPTA | |
| | VLGNVIISLG KYLGSVNYNS EGIAIGPPVF | |
| | TDKVDISSQI SSMNQSLQQS KDYIKEAQRL | |
| | LDTVNPSLIS MLSMIILYVL SIASLCIGLI | |
| | TFISFIIVEK KRNT | |
| 9266 | MGPAENKKVR FENTTSDKGK IPSKVIKSYY | NiVG protein |
| | GTMDIKKINE GLLDSKILSA FNTVIALLGS | attachment |
| | IVIIVMNIMI IQNYTRSTDN QAVIKDALQG | glycoprotein (602 aa) |
| | IQQQIKGLAD KIGTEIGPKV SLIDTSSTIT | |
| | IPANIGLLGS KISQSTASIN ENVNEKCKFT | |
| | LPPLKIHECN ISCPNPLPFR EYRPQTEGVS | |
| | NLVGLPNNIC LQKTSNQILK PKLISYTLPV | |
| | VGQSGTCITD PLLAMDEGYF AYSHLERIGS | |
| | CSRGVSKQRI IGVGEVLDRG DEVPSLFMTN | |
| | VWTPPNPNTV YHCSAVYNNE FYYVLCAVST | |
| | VGDPILNSTY WSGSLMMTRL AVKPKSNGGG | |
| | YNQHQLALRS IEKGRYDKVM PYGPSGIKQG | |
| | DTLYFPAVGF LVRTEFKYND SNCPITKCQY | |
| | SKPENCRLSM GIRPNSHYIL RSGLLKYNLS | |
| | DGENPKVVFI EISDQRLSIG SPSKIYDSLG | |
| | QPVFYQASFS WDTMIKFGDV LTVNPLVVNW | |
| | RNNTVISRPG QSQCPRENTC PEICWEGVYN | |
| | DAFLIDRINW ISAGVFLDSN QTAENPVFTV | |
| | FKDNEILYRA QLASEDTNAQ KTITNCFLLK | |
| | NKIWCISLVE IYDTGDNVIR PKLFAVKIPE QC | |
| 9267 | MGKVR FENTTSDKGK IPSKVIKSYY GTMDIKKINE | NiVG protein |
| | GLLDSKILSA FNTVIALLGS IVIIVMNIMI | attachment |
| | IQNYTRSTDN QAVIKDALQG IQQQIKGLAD | glycoprotein |
| | KIGTEIGPKV SLIDTSSTIT IPANIGLLGS | Truncated Δ5 |
| | KISQSTASIN ENVNEKCKFT LPPLKIHECN | |
| | ISCPNPLPFR EYRPQTEGVS NLVGLPNNIC | |
| | LQKTSNQILK PKLISYTLPV VGQSGTCITD | |
| | PLLAMDEGYF AYSHLERIGS CSRGVSKQRI | |
| | IGVGEVLDRG DEVPSLFMIN VWTPPNPNTV | |
| | YHCSAVYNNE FYYVLCAVST VGDPILNSTY | |
| | WSGSLMMTRL AVKPKSNGGG YNQHQLALRS | |
| | IEKGRYDKVM PYGPSGIKQG DTLYFPAVGF | |
| | LVRTEFKYND SNCPITKCQY SKPENCRLSM | |
| | GIRPNSHYIL RSGLLKYNLS DGENPKVVFI | |
| | EISDQRLSIG SPSKIYDSLG QPVFYQASFS | |
| | WDTMIKFGDV LTVNPLVVNW RNNTVISRPG | |
| | QSQCPRENTC PEICWEGVYN DAFLIDRINW | |

| | | |
|---|---|---|
| | ISAGVFLDSN QTAENPVFTV FKDNEILYRA | |
| | QLASEDINAQ KTITNCFLLK NKIWCISLVE | |
| | IYDTGDNVIR PKLFAVKIPE QC | |
| 9268 | MGNTTSDKGK IPSKVIKSYY GTMDIKKINE | NiVG protein |
| | GLLDSKILSA FNTVIALLGS IVIIVMNIMI | attachment |
| | IQNYTRSTDN QAVIKDALQG IQQQIKGLAD | glycoprotein |
| | KIGTEIGPKV SLIDTSSTIT IPANIGLLGS | Truncated Δ10 |
| | KISQSTASIN ENVNEKCKFT LPPLKIHECN | |
| | ISCPNPLPFR EYRPQTEGVS NLVGLPNNIC | |
| | LQKTSNQILK PKLISYTLPV VGQSGTCITD | |
| | PLLAMDEGYF AYSHLERIGS CSRGVSKQRI | |
| | IGVGEVLDRG DEVPSLFMTN VWTPPNPNTV | |
| | YHCSAVYNNE FYYVLCAVST VGDPILNSTY | |
| | WSGSLMMTRL AVKPKSNGGG YNQHQLALRS | |
| | IEKGRYDKVM PYGPSGIKQG DTLYFPAVGF | |
| | LVRTEFKYND SNCPITKCQY SKPENCRLSM | |
| | GIRPNSHYIL RSGLLKYNLS DGENPKVVFI | |
| | EISDQRLSIG SPSKIYDSLG QPVFYQASFS | |
| | WDTMIKFGDV LTVNPLVVNW RNNTVISRPG | |
| | QSQCPRENTC PEICWEGVYN DAFLIDRINW | |
| | ISAGVFLDSN QTAENPVFTV FKDNEILYRA | |
| | QLASEDTNAQ KTITNCFLLK NKIWCISLVE | |
| | IYDTGDNVIR PKLFAVKIPE QC | |
| 9269 | MGKGK IPSKVIKSYY GIMDIKKINE GLLDSKILSA | NiVG protein |
| | FNTVIALLGS IVIIVMNIMI IQNYTRSTDN | attachment |
| | QAVIKDALQG IQQQIKGLAD KIGTEIGPKV | glycoprotein |
| | SLIDTSSTIT IPANIGLLGS KISQSTASIN | Truncated Δ15 |
| | ENVNEKCKFT LPPLKIHECN ISCPNPLPER | |
| | EYRPQTEGVS NLVGLPNNIC LQKTSNQILK | |
| | PKLISYTLPV VGQSGICITD PLLAMDEGYF | |
| | AYSHLERIGS CSRGVSKQRI IGVGEVLDRG | |
| | DEVPSLFMIN VWTPPNPNTV YHCSAVYNNE | |
| | FYYVLCAVST VGDPILNSTY WSGSLMMTRL | |
| | AVKPKSNGGG YNQHQLALRS IEKGRYDKVM | |
| | PYGPSGIKQG DTLYFPAVGF LVRIEFKYND | |
| | SNCPITKCQY SKPENCRLSM GIRPNSHYIL | |
| | RSGLLKYNLS DGENPKVVFI EISDQRLSIG | |
| | SPSKIYDSLG QPVFYQASFS WDTMIKFGDV | |
| | LTVNPLVVNW RNNTVISRPG QSQCPRENTC | |
| | PEICWEGVYN DAFLIDRINW ISAGVFLDSN | |
| | QTAENPVFTV FKDNEILYRA QLASEDTNAQ | |
| | KTITNCFLLK NKIWCISLVE IYDTGDNVIR | |
| | PKLFAVKIPE QC | |

| | | |
|---|---|---|
| 9270 | MGSKVIKSYY GTMDIKKINE GLLDSKILSA | NiVG protein |
| | FNTVIALLGS IVIIVMNIMI IQNYTRSTDN | attachment |
| | QAVIKDALQG IQQQIKGLAD KIGTEIGPKV | glycoprotein |
| | SLIDTSSTIT IPANIGLLGS KISQSTASIN | Truncated Δ20 |
| | ENVNEKCKFT LPPLKIHECN ISCPNPLPER | |
| | EYRPQTEGVS NLVGLPNNIC LQKTSNQILK | |
| | PKLISYTLPV VGQSGTCITD PLLAMDEGYF | |
| | AYSHLERIGS CSRGVSKQRI IGVGEVLDRG | |
| | DEVPSLFMTN VWTPPNPNTV YHCSAVYNNE | |
| | FYYVLCAVST VGDPILNSTY WSGSLMMTRL | |
| | AVKPKSNGGG YNQHQLALRS IEKGRYDKVM | |
| | PYGPSGIKQG DTLYFPAVGF LVRIEFKYND | |
| | SNCPITKCQY SKPENCRLSM GIRPNSHYIL | |
| | RSGLLKYNLS DGENPKVVFI EISDQRLSIG | |
| | SPSKIYDSLG QPVFYQASFS WDTMIKFGDV | |
| | LTVNPLVVNW RNNTVISRPG QSQCPRENTC | |
| | PEICWEGVYN DAFLIDRINW ISAGVELDSN | |
| | QTAENPVFTV FKDNEILYRA QLASEDTNAQ | |
| | KTITNCFLLK NKIWCISLVE IYDTGDNVIR | |
| | PKLFAVKIPE QC | |
| 9271 | MGSYY GTMDIKKINE GLLDSKILSA FNTVIALLGS | NiVG protein |
| | IVIIVMNIMI IQNYTRSTDN QAVIKDALQG | attachment |
| | IQQQIKGLAD KIGTEIGPKV SLIDTSSTIT | glycoprotein |
| | IPANIGLLGS KISQSTASIN ENVNEKCKFT | Truncated Δ25 |
| | LPPLKIHECN ISCPNPLPER EYRPQTEGVS | |
| | NLVGLPNNIC LQKTSNQILK PKLISYTLPV | |
| | VGQSGTCITD PLLAMDEGYF AYSHLERIGS | |
| | CSRGVSKQRI IGVGEVLDRG DEVPSLFMTN | |
| | VWTPPNPNTV YHCSAVYNNE FYYVLCAVST | |
| | VGDPILNSTY WSGSLMMTRL AVKPKSNGGG | |
| | YNQHQLALRS IEKGRYDKVM PYGPSGIKQG | |
| | DTLYFPAVGF LVRTEFKYND SNCPITKCQY | |
| | SKPENCRLSM GIRPNSHYIL RSGLLKYNLS | |
| | DGENPKVVFI EISDQRLSIG SPSKIYDSLG | |
| | QPVFYQASFS WDTMIKFGDV LTVNPLVVNW | |
| | RNNTVISRPG QSQCPRENTC PEICWEGVYN | |
| | DAFLIDRINW ISAGVFLDSN QTAENPVFTV | |
| | FKDNEILYRA QLASEDTNAQ KTITNCFLLK | |
| | NKIWCISLVE IYDTGDNVIR PKLFAVKIPE QC | |
| 9272 | MGTMDIKKINE GLLDSKILSA FNTVIALLGS | NiVG protein |
| | IVIIVMNIMI IQNYTRSTDN QAVIKDALQG | attachment |
| | IQQQIKGLAD KIGTEIGPKV SLIDTSSTIT | glycoprotein |
| | IPANIGLLGS KISQSTASIN ENVNEKCKFT | Truncated Δ30 |
| | LPPLKIHECN ISCPNPLPER EYRPQTEGVS | |
| | NLVGLPNNIC LQKTSNQILK PKLISYTLPV | |
| | VGQSGTCITD PLLAMDEGYF AYSHLERIGS | |
| | CSRGVSKQRI IGVGEVLDRG DEVPSLFMTN | |
| | VWTPPNPNTV YHCSAVYNNE FYYVLCAVST | |
| | VGDPILNSTY WSGSLMMTRL AVKPKSNGGG | |
| | YNQHQLALRS IEKGRYDKVM PYGPSGIKQG | |
| | DTLYFPAVGF LVRTEFKYND SNCPITKCQY | |
| | SKPENCRLSM GIRPNSHYIL RSGLLKYNLS | |
| | DGENPKVVFI EISDQRLSIG SPSKIYDSLG | |
| | QPVFYQASFS WDTMIKFGDV LTVNPLVVNW | |
| | RNNTVISRPG QSQCPRENTC PEICWEGVYN | |
| | DAFLIDRINW ISAGVELDSN QTAENPVFTV | |
| | FKDNEILYRA QLASEDTNAQ KTITNCFLLK | |
| | NKIWCISLVE IYDTGDNVIR PKLFAVKIPE QC | |
| 9273 | MKKINEGLLDSKILSA FNTVIALLGS IVIIVMNIMI | NiVG protein |
| | IQNYTRSTDN QAVIKDALQG IQQQIKGLAD | attachment |
| | KIGTEIGPKV SLIDTSSTIT IPANIGLLGS | glycoprotein |
| | KISQSTASIN ENVNEKCKFT LPPLKIHECN | Truncated and |
| | ISCPNPLPFR EYRPQTEGVS NLVGLPNNIC | mutated |
| | LQKTSNQILK PKLISYTLPV VGQSGTCITD | (E501A, W504A, |
| | PLLAMDEGYF AYSHLERIGS CSRGVSKQRI | Q530A, E533A) NIV G |
| | IGVGEVLDRG DEVPSLFMTN VWTPPNPNTV | protein (Gc Δ 34) |
| | YHCSAVYNNE FYYVLCAVST VGDPILNSTY | |
| | WSGSLMMTRL AVKPKSNGGG YNQHQLALRS | |
| | IEKGRYDKVM PYGPSGIKQG DTLYFPAVGF | |
| | LVRTEFKYND SNCPITKCQY SKPENCRLSM | |
| | GIRPNSHYIL RSGLLKYNLS DGENPKVVFI | |
| | EISDQRLSIG SPSKIYDSLG QPVFYQASFS | |
| | WDTMIKFGDV LTVNPLVVNW RNNTVISRPG | |
| | QSQCPRENTC PAICAEGVYN DAFLIDRINW | |
| | ISAGVFLDSN ATAANPVFTV FKDNEILYRA | |
| | QLASEDTNAQ KTITNCFLLK NKIWCISLVE | |
| | IYDTGDNVIR PKLFAVKIPE QCT | |
| 9274 | MATQEVRLKC LLCGIIVLVL SLEGLGILHY | Hendra virus F protein |
| | EKLSKIGLVK GITRKYKIKS | Uniprot O89342 (with |
| | NPLTKDIVIK MIPNVSNVSK CTGTVMENYK | signal sequence) |
| | SRLIGILSPI KGAIELYNNN | |
| | THDLVGDVKL AGVVMAGIAI GIATAAQITA | |
| | GVALYEAMKN ADNINKLKSS | |
| | IESTNEAVVK LQETAEKTVY VLTALQDYIN | |
| | TNLVPTIDQI SCKQTELALD | |
| | LALSKYLSDL LFVFGPNLQD PVSNSMTIQA | |
| | ISQAFGGNYE TLLRTLGYAT EDFDDLLESD | |
| | SIAGQIVYVD LSSYYIIVRV YFPILTEIQQ | |
| | AYVQELLPVS | |
| | FNNDNSEWIS IVPNFVLIRN TLISNIEVKY | |
| | CLITKKSVIC NQDYATPMTA | |
| | SVRECLIGST DKCPRELVVS SHVPRFALSG | |
| | GVLFANCISV TCQCQTTGRA ISQSGEQTLL | |
| | MIDNTTCTTV VLGNIIISLG KYLGSINYNS | |
| | ESIAVGPPVY | |
| | TDKVDISSQI SSMNQSLQQS KDYIKEAQKI | |
| | LDTVNPSLIS MLSMIILYVL | |
| | SIAALCIGLI TFISFVIVEK KRGNYSRLDD | |
| | RQVRPVSNGD LYYIGT | |
| 9275 | MMADSKLVSL NNNLSGKIKD QGKVIKNYYG | Hendra virus G protein |
| | TMDIKKINDG LLDSKILGAF | Uniprot O89343 |
| | NTVIALLGSI IIIVMNIMII QNYTRTTDNQ | |
| | ALIKESLQSV QQQIKALTDK IGTEIGPKVS | |
| | LIDTSSTITI PANIGLLGSK ISQSTSSINE | |
| | NVNDKCKFTL | |
| | PPLKIHECNI SCPNPLPFRE YRPISQGVSD | |
| | LVGLPNQICL QKTTSTILKP RLISYTLPIN | |
| | TREGVCITDP LLAVDNGFFA YSHLEKIGSC | |
| | TRGIAKQRII GVGEVLDRGD KVPSMFMTNV | |
| | WTPPNPSTIH HCSSTYHEDF YYTLCAVSHV | |
| | GDPILNSTSW TESLSLIRLA VRPKSDSGDY | |
| | NQKYIAITKV ERGKYDKVMP | |
| | YGPSGIKQGD TLYFPAVGFL PRTEFQYNDS | |
| | NCPIIHCKYS KAENCRLSMG | |
| | VNSKSHYILR SGLLKYNLSL GGDIILQFIE | |
| | IADNRLTIGS PSKIYNSLGQ PVFYQASYSW | |
| | DTMIKLGDVD TVDPLRVQWR NNSVISRPGQ | |
| | SQCPRFNVCP | |
| | EVCWEGTYND AFLIDRLNWV SAGVYLNSNQ | |
| | TAENPVFAVF KDNEILYQVP LAEDDTNAQK | |
| | TITDCFLLEN VIWCISLVEI YDTGDSVIRP | |
| | KLFAVKIPAQ CSES | |
| 9276 | MVVILDKRCY CNLLILILMI SECSVGILHY | Nipah virus NiV-F FO |
| | EKLSKIGLVK GVTRKYKIKS NPLIKDIVIK | T234 truncation (aa |
| | MIPNVSNMSQ CTGSVMENYK TRINGILTPI | 525-544) (with signal |
| | KGALEIYKNN THDLVGDVRL AGVIMAGVAI | sequence) |
| | GIATAAQITA GVALYEAMKN ADNINKLKSS | |
| | IESTNEAVVK LQETAEKTVY VLTALQDYIN | |
| | TNLVPTIDKI SCKQTELSLD LALSKYLSDL | |
| | LFVFGPNLQD PVSNSMTIQA ISQAFGGNYE | |
| | TLLRTLGYAT EDFDDLLESD SITGQIIYVD | |
| | LSSYYIIVRV YFPILTEIQQ AYIQELLPVS | |
| | FNNDNSEWIS IVPNFILVRN TLISNIEIGE | |
| | CLITKRSVIC NQDYATPMIN NMRECLTGST | |
| | EKCPRELVVS SHVPRFALSN GVLFANCISV | |
| | TCQCQTTGRA ISQSGEQTLL MIDNTTCPTA | |
| | VLGNVIISLG KYLGSVNYNS EGIAIGPPVF | |
| | TDKVDISSQI SSMNQSLQQS KDYIKEAQRL | |
| | LDTVNPSLIS MLSMIILYVL SIASLCIGLI | |
| | TFISFIIVEK KRNTGT | |
| 9277 | MVVILDKRCY CNLLILILMI SECSVGILHY | Nipah virus NiV-F F0 |
| | EKLSKIGLVK GVTRKYKIKS NPLIKDIVIK | T234 truncation (aa |
| | MIPNVSNMSQ CTGSVMENYK TRLNGILTPI | 525-544) AND |
| | KGALEIYKNQ THDLVGDVRL AGVIMAGVAI | mutation on N-linked |
| | GIATAAQITA GVALYEAMKN ADNINKLKSS | glycosylation site |
| | IESTNEAVVK LQETAEKTVY VLTALQDYIN | (with signal sequence) |
| | TNLVPTIDKI SCKQTELSLD LALSKYLSDL | |
| | LFVFGPNLQD PVSNSMTIQA ISQAFGGNYE | |
| | TLLRTLGYAT EDFDDLLESD SITGQIIYVD | |
| | LSSYYIIVRV YFPILTEIQQ AYIQELLPVS | |
| | FNNDNSEWIS IVPNFILVRN TLISNIEIGF | |
| | CLITKRSVIC NQDYATPMIN NMRECLTGST | |
| | EKCPRELVVS SHVPRFALSN GVLFANCISV | |
| | TCQCQTTGRA ISQSGEQTLL MIDNTTCPTA | |
| | VLGNVIISLG KYLGSVNYNS EGIAIGPPVF | |
| | TDKVDISSQI SSMNQSLQQS KDYIKEAQRL | |
| | LDTVNPSLIS MLSMIILYVL SIASLCIGLI | |
| | TFISFIIVEK KRNTGT | |
| 9278 | MVVILDKRCY CNLLILILMI SECSVGILHY | Truncated NiV fusion |
| | EKLSKIGLVK GVTRKYKIKS NPLTKDIVIK | glycoprotein |
| | MIPNVSNMSQ CTGSVMENYK TRLNGILTPI | (FcDelta22) at |
| | KGALEIYKNN THDLVGDVRL AGVIMAGVAI | cytoplasmic tail (with |
| | GIATAAQITA GVALYEAMKN ADNINKLKSS | signal sequence) |
| | IESTNEAVVK LQETAEKTVY VLTALQDYIN | |
| | TNLVPTIDKI SCKQTELSLD LALSKYLSDL | |
| | LFVFGPNLQD PVSNSMTIQA ISQAFGGNYE | |
| | TLLRTLGYAT EDFDDLLESD SITGQIIYVD | |
| | LSSYYIIVRV YFPILTEIQQ AYIQELLPVS | |
| | FNNDNSEWIS IVPNFILVRN TLISNIEIGE | |
| | CLITKRSVIC NQDYATPMIN NMRECLIGST | |
| | EKCPRELVVS SHVPRFALSN GVLFANCISV | |
| | TCQCQTTGRA ISQSGEQTLL MIDNTTCPTA | |
| | VLGNVIISLG KYLGSVNYNS EGIAIGPPVE | |
| | TDKVDISSQI SSMNQSLQQS KDYIKEAQRL | |
| | LDTVNPSLIS MLSMIILYVL SIASLCIGLI | |
| | TFISFIIVEK KRNT | |
| 9279 | MKKINEGLLDSKILSA FNTVIALLGS IVIIVMNIMI | NiVG protein |
| | IQNYTRSTDN QAVIKDALQG IQQQIKGLAD | attachment |
| | KIGTEIGPKV SLIDTSSTIT IPANIGLLGS | glycoprotein |
| | KISQSTASIN ENVNEKCKFT LPPLKIHECN | Truncated (Gc Δ 34) |
| | ISCPNPLPFR EYRPQTEGVS NLVGLPNNIC | |
| | LQKTSNQILK PKLISYTLPV VGQSGTCITD | |
| | PLLAMDEGYF AYSHLERIGS CSRGVSKQRI | |
| | IGVGEVLDRG DEVPSLFMIN VWTPPNPNTV | |
| | YHCSAVYNNE FYYVLCAVST VGDPILNSTY | |
| | WSGSLMMTRL AVKPKSNGGG YNQHQLALRS | |
| | IEKGRYDKVM PYGPSGIKQG DTLYFPAVGF | |
| | LVRTEFKYND SNCPITKCQY SKPENCRLSM | |
| | GIRPNSHYIL RSGLLKYNLS DGENPKVVFI | |
| | EISDQRLSIG SPSKIYDSLG QPVFYQASFS | |
| | WDTMIKFGDV LTVNPLVVNW RNNTVISRPG | |
| | QSQCPRENTC PEICWEGVYN DAFLIDRINW | |
| | ISAGVFLDSN QTAENPVFTV FKDNEILYRA | |
| | QLASEDTNAQ KTITNCFLLK NKIWCISLVE | |
| | IYDTGDNVIR PKLFAVKIPE QCT | |
| 9280 | ILHY EKLSKIGLVK GVTRKYKIKS NPLTKDIVIK | Truncated mature NiV |
| | MIPNVSNMSQ CTGSVMENYK TRLNGILTPI | fusion glycoprotein |
| | KGALEIYKNN THDLVGDVRL AGVIMAGVAI | (FcDelta22) at |
| | GIATAAQITA GVALYEAMKN ADNINKLKSS | cytoplasmic tail |
| | IESTNEAVVK LQETAEKTVY VLTALQDYIN | |
| | TNLVPTIDKI SCKQTELSLD LALSKYLSDL | |
| | LFVFGPNLQD PVSNSMTIQA ISQAFGGNYE | |
| | TLLRTLGYAT EDFDDLLESD SITGQIIYVD | |
| | LSSYYIIVRV YFPILTEIQQ AYIQELLPVS | |
| | FNNDNSEWIS IVPNFILVRN TLISNIEIGF | |
| | CLITKRSVIC NQDYATPMIN NMRECLIGST | |
| | EKCPRELVVS SHVPRFALSN GVLFANCISV | |
| | TCQCQTTGRA ISQSGEQTLL MIDNTTCPTA | |
| | VLGNVIISLG KYLGSVNYNS EGIAIGPPVF | |
| | TDKVDISSQI SSMNQSLQQS KDYIKEAQRL | |
| | LDTVNPSLIS MLSMIILYVL SIASLCIGLI | |
| | TFISFIIVEK KRNT | |
| 9281 | MSNKRITVLIIISYTLFYLNNAAIVGFDFDKLNKIGVVQG | gb: JQ001776:6129- |
| | RVLNYKIKGDPMTKDLVLKFIPNIVNITECVREPLSRYNE | 8166\|Organism: Cedar |
| | TVRRLLLPIHNMLGLYLNNTNAKMTGLMIAGVIMGGIAIG | virus\|Strain |
| | IATAAQITAGFALYEAKKNTENIQKLIDSIMKTQDSIDKL | Name: CG1a\|Protein |
| | TDSVGTSILILNKLQTYINNQLVPNLELLSCRQNKIEFDL | Name: fusion |
| | MLTKYLVDLMTVIGPNINNPVNKDMTIQSLSLLFDGNYDI | glycoprotein\|Gene |
| | MMSELGYTPQDFLDLIESKSITGQIIYVDMENLYVVIRTY | Symbol: F (with signal |
| | LPTLIEVPDAQIYEFNKITMSSNGGEYLSTIPNFILIRGN | sequence) |
| | YMSNIDVATCYMTKASVICNQDYSLPMSQNLRSCYQGETE | |
| | YCPVEAVIASHSPRFALINGVIFANCINTICRCQDNGKTI | |
| | TQNINQFVSMIDNSTCNDVMVDKFTIKVGKYMGRKDINNI | |
| | NIQIGPQIIIDKVDLSNEINKMNQSLKDSIFYLREAKRIL | |
| | DSVNISLISPSVQLFLIIISVLSFIILLIIIVYLYCKSKH | |
| | SYKYNKFIDDPDYYNDYKRERINGKASKSNNIYYVGD | |
| 9282 | MALNKNMFSSLFLGYLLVYATTVQSSIHYDSLSKVGVIKG | gb: NC_025352:5950- |
| | LTYNYKIKGSPSTKLMVVKLIPNIDSVKNCTQKQYDEYKN | 8712\|Organism: Mojiang |
| | LVRKALEPVKMAIDTMLNNVKSGNNKYRFAGAIMAGVALG | virus\|Strain |
| | VATAATVTAGIALHRSNENAQAIANMKSAIQNTNEAVKQL | Name: Tongguan1\|Protein |
| | QLANKQTLAVIDTIRGEINNNIIPVINQLSCDTIGLSVGI | Name: fusion |
| | RLTQYYSEIITAFGPALQNPVNTRITIQAISSVENGNFDE | protein\|Gene |
| | LLKIMGYTSGDLYEILHSELIRGNIIDVDVDAGYIALEIE | Symbol: F (with signal |
| | FPNLTLVPNAVVQELMPISYNIDGDEWVTLVPRFVLTRIT | sequence) |
| | LLSNIDTSRCTITDSSVICDNDYALPMSHELIGCLQGDTS | |
| | KCAREKVVSSYVPKFALSDGLVYANCLNTICRCMDTDTPI | |
| | SQSLGATVSLLDNKRCSVYQVGDVLISVGSYLGDGEYNAD | |
| | NVELGPPIVIDKIDIGNQLAGINQTLQEAEDYIEKSEEFL | |
| | KGVNPSIITLGSMVVLYIFMILIAIVSVIALVLSIKLTVK | |
| | GNVVRQQFTYTQHVPSMENINYVSH | |
| 9283 | MKKKTDNPTISKRGHNHSRGIKSRALLRETDNYSNGLIVE | gb: NC_025256:6865- |
| | NLVRNCHHPSKNNLNYTKTQKRDSTIPYRVEERKGHYPKI | 8853\|Organism: Bat |
| | KHLIDKSYKHIKRGKRRNGHNGNIITIILLLILILKTQMS | Paramyxovirus |
| | EGAIHYETLSKIGLIKGITREYKVKGTPSSKDIVIKLIPN | Eid_hel/GH- |
| | VTGLNKCTNISMENYKEQLDKILIPINNIIELYANSTKSA | M74a/GHA/2009\|Strain |
| | PGNARFAGVIIAGVALGVAAAAQITAGIALHEARQNAERI | Name: BatPV/Eid_hel/ |
| | NLLKDSISATNNAVAELQEATGGIVNVITGMQDYININLV | GH-M74a/GHA/2009\| |
| | PQIDKLQCSQIKTALDISLSQYYSEILTVFGPNLQNPVTT | Protein |
| | SMSIQAISQSFGGNIDLLLNLLGYTANDLLDLLESKSITG | Name: fusion |
| | QITYINLEHYFMVIRVYYPIMTTISNAYVQELIKISFNVD | protein\|Gene |
| | GSEWVSLVPSYILIRNSYLSNIDISECLITKNSVICRHDF | Symbol: F (with signal |
| | AMPMSYTLKECLTGDTEKCPREAVVTSYVPRFAISGGVIY | sequence) |
| | ANCLSTTCQCYQTGKVIAQDGSQTLMMIDNQTCSIVRIEE | |
| | ILISTGKYLGSQEYNTMHVSVGNPVFTDKLDITSQISNIN | |
| | QSIEQSKFYLDKSKAILDKINLNLIGSVPISILFIIAILS | |
| | LILSIITFVIVMIIVRRYNKYTPLINSDPSSRRSTIQDVY | |
| | IIPNPGEHSIRSAARSIDRDRD | |
| 9284 | (GGGGGS)n wherein n is 1 to 6 | Peptide Linker |
| 9285 | MPAENKKVRFENTTSDKGKIPSKVIKSYYGTMDIKKINEG | gb: AF212302\|Organism: |
| | LLDSKILSAFNTVIALLGSIVIIVMNIMIIQNYTRSTDNQ | Nipah virus\|Strain |
| | AVIKDALQGIQQQIKGLADKIGTEIGPKVSLIDTSSTITI | Name: UNKNOWN- |
| | PANIGLLGSKISQSTASINENVNEKCKFTLPPLKIHECNI | AF212302\|Protein |
| | SCPNPLPFREYRPQTEGVSNLVGLPNNICLQKTSNQILKP | Name: attachment |
| | KLISYTLPVVGQSGTCITDPLLAMDEGYFAYSHLERIGSC | glycoprotein\|Gene |
| | SRGVSKQRIIGVGEVLDRGDEVPSLFMTNVWTPPNPNTVY | Symbol: G |
| | HCSAVYNNEFYYVLCAVSTVGDPILNSTYWSGSLMMTRLA | (Uniprot Q9IH62) |
| | VKPKSNGGGYNQHQLALRSIEKGRYDKVMPYGPSGIKQGD | |
| | TLYFPAVGFLVRTEFKYNDSNCPITKCQYSKPENCRLSMG | |
| | IRPNSHYILRSGLLKYNLSDGENPKVVFIEISDQRLSIGS | |
| | PSKIYDSLGQPVFYQASFSWDTMIKFGDVLTVNPLVVNWR | |
| | NNTVISRPGQSQCPRFNTCPEICWEGVYNDAFLIDRINWI | |
| | SAGVFLDSNQTAENPVFTVFKDNEILYRAQLASEDTNAQK | |
| | TITNCFLLKNKIWCISLVEIYDTGDNVIRPKLFAVKIPEQ | |
| | CT | |
| 9286 | MLSQLQKNYLDNSNQQGDKMNNPDKKLSVNFNPLELDKGQ | gb: JQ001776:8170- |
| | KDLNKSYYVKNKNYNVSNLLNESLHDIKFCIYCIFSLLII | 10275\|Organism: Cedar |
| | ITIINIITISIVITRLKVHEENNGMESPNLQSIQDSLSSL | virus\|Strain |
| | TNMINTEITPRIGILVTATSVTLSSSINYVGTKTNQLVNE | Name: CG1a\|Protein |
| | LKDYITKSCGFKVPELKLHECNISCADPKISKSAMYSTNA | Name: attachment |
| | YAELAGPPKIFCKSVSKDPDFRLKQIDYVIPVQQDRSICM | glycoprotein\|Gene |
| | NNPLLDISDGFFTYIHYEGINSCKKSDSFKVLLSHGEIVD | Symbol: G |
| | RGDYRPSLYLLSSHYHPYSMQVINCVPVTCNQSSFVFCHI | |
| | SNNTKTLDNSDYSSDEYYITYFNGIDRPKTKKIPINNMTA | |
| | DNRYIHFTFSGGGGVCLGEEFIIPVTTVINTDVFTHDYCE | |
| | SFNCSVQTGKSLKEICSESLRSPINSSRYNLNGIMIISQN | |
| | NMTDFKIQLNGITYNKLSFGSPGRLSKTLGQVLYYQSSMS | |
| | WDTYLKAGFVEKWKPFTPNWMNNTVISRPNQGNCPRYHKC | |
| | PEICYGGTYNDIAPLDLGKDMYVSVILDSDQLAENPEITV | |
| | FNSTTILYKERVSKDELNTRSTTTSCFLFLDEPWCISVLE | |
| | TNRFNGKSIRPEIYSYKIPKYC | |
| 9287 | MPQKTVEFINMNSPLERGVSTLSDKKTLNQSKITKQGYFG | gb: NC_025256:9117- |
| | LGSHSERNWKKQKNQNDHYMTVSIMILEILVVLGIMENLI | 11015\|Organism: Bat |
| | VLTMVYYQNDNINQRMAELTSNITVLNLNLNQLINKIQRE | Paramyxovirus |
| | IIPRITLIDTATTITIPSAITYILATLITRISELLPSINQ | Eid_hel/GH- |
| | KCEFKTPTLVLNDCRINCTPPLNPSDGVKMSSLATNLVAH | M74a/GHA/2009\|Strain |
| | GPSPCRNFSSVPTIYYYRIPGLYNRTALDERCILNPRLTI | Name: BatPV/Eid_hel/ |
| | SSTKFAYVHSEYDKNCTRGFKYYELMTFGEILEGPEKEPR | GH- |
| | MFSRSFYSPTNAVNYHSCTPIVTVNEGYFLCLECTSSDPL | M74a/GHA/2009\|Protein |
| | YKANLSNSTFHLVILRHNKDEKIVSMPSFNLSTDQEYVQI | Name: glycoprotein\| |
| | IPAEGGGTAESGNLYFPCIGRLLHKRVTHPLCKKSNCSRT | Gene Symbol: G |
| | DDESCLKSYYNQGSPQHQVVNCLIRIRNAQRDNPTWDVIT | |
| | VDLTNTYPGSRSRIFGSFSKPMLYQSSVSWHTLLQVAEIT | |
| | DLDKYQLDWLDTPYISRPGGSECPFGNYCPTVCWEGTYND | |
| | VYSLTPNNDLFVTVYLKSEQVAENPYFAIFSRDQILKEFP | |
| | LDAWISSARTTTISCFMFNNEIWCIAALEITRLNDDIIRP | |
| | IYYSFWLPTDCRTPYPHTGKMTRVPLRSTYNY | |
| 9288 | MATNRDNTITSAEVSQEDKVKKYYGVETAEKVADSISGNK | gb: NC_025352:8716- |
| | VFILMNTLLILTGAIITITLNITNLTAAKSQQNMLKIIQD | 11257\|Organism: Mojiang |
| | DVNAKLEMFVNLDQLVKGEIKPKVSLINTAVSVSIPGQIS | virus\|Strain |
| | NLQTKFLQKYVYLEESITKQCTCNPLSGIFPTSGPTYPPT | Name: Tongguan1\| |
| | DKPDDDTTDDDKVDTTIKPIEYPKPDGCNRTGDHFTMEPG | Protein Name: |
| | ANFYTVPNLGPASSNSDECYTNPSFSIGSSIYMFSQEIRK | attachment |
| | TDCTAGEILSIQIVLGRIVDKGQQGPQASPLLVWAVPNPK | glycoprotein\|Gene |
| | IINSCAVAAGDEMGWVLCSVTLTAASGEPIPHMEDGEWLY | Symbol: G |
| | KLEPDTEVVSYRITGYAYLLDKQYDSVFIGKGGGIQKGND | |
| | LYFQMYGLSRNRQSFKALCEHGSCLGTGGGGYQVLCDRAV | |
| | MSFGSEESLITNAYLKVNDLASGKPVIIGQTFPPSDSYKG | |
| | SNGRMYTIGDKYGLYLAPSSWNRYLRFGITPDISVRSTTW | |
| | LKSQDPIMKILSTCTNTDRDMCPEICNTRGYQDIFPLSED | |
| | SEYYTYIGITPNNGGTKNFVAVRDSDGHIASIDILQNYYS | |
| | ITSATISCFMYKDEIWCIAITEGKKQKDNPQRIYAHSYKI | |
| | RQMCYNMKSATVTVGNAKNITIRRY | |
| 9289 | FNTVIALLGS IVIIVMNIMI IQNYTRSTDN | NivG protein |
| | QAVIKDALQG IQQQIKGLAD KIGTEIGPKV | attachment |
| | SLIDTSSTIT IPANIGLLGS KISQSTASIN | glycoprotein |
| | ENVNEKCKFT LPPLKIHECN ISCPNPLPER | Without cytoplasmic |
| | EYRPQTEGVS NLVGLPNNIC LQKTSNQILK | tail |
| | PKLISYTLPV VGQSGTCITD PLLAMDEGYF | Uniprot Q9IH62 |
| | AYSHLERIGS CSRGVSKQRI IGVGEVLDRG | |
| | DEVPSLFMIN VWTPPNPNTV YHCSAVYNNE | |
| | FYYVLCAVST VGDPILNSTY WSGSLMMTRL | |
| | AVKPKSNGGG YNQHQLALRS IEKGRYDKVM | |
| | PYGPSGIKQG DTLYFPAVGF LVRTEFKYND | |
| | SNCPITKCQY SKPENCRLSM GIRPNSHYIL | |
| | RSGLLKYNLS DGENPKVVFI EISDQRLSIG | |
| | SPSKIYDSLG QPVFYQASFS WDTMIKFGDV | |
| | LTVNPLVVNW RNNTVISRPG | |
| | PEICWEGVYN DAFLIDRINW ISAGVELDSN | |
| | QTAENPVFTV FKDNEILYRA QLASEDTNAQ | |
| | KTITNCFLLK NKIWCISLVE IYDIGDNVIR | |
| | PKLFAVKIPE QC | |
| 9290 | FNTVIALLGSI IIIVMNIMII QNYTRTTDNQ | Hendra virus G protein |
| | ALIKESLQSV QQQIKALTDK | Uniprot O89343 |
| | IGTEIGPKVS LIDTSSTITI PANIGLLGSK | Without cytoplasmic |
| | ISQSTSSINE NVNDKCKFTL | tail |
| | PPLKIHECNI SCPNPLPFRE | YRPISQGVSD |
| | LVGLPNQICL QKITSTILKP | |
| | RLISYTLPIN TREGVCITDP LLAVDNGFFA | |
| | YSHLEKIGSC TRGIAKQRII | |
| | GVGEVLDRGD KVPSMFMTNV WTPPNPSTIH | |
| | HCSSTYHEDF YYTLCAVSHV | |
| | GDPILNSTSW TESLSLIRLA VRPKSDSGDY | |
| | NQKYIAITKV ERGKYDKVMP | |
| | YGPSGIKQGD TLYFPAVGFL PRTEFQYNDS | |
| | NCPIIHCKYS KAENCRLSMG | |
| | VNSKSHYILR SGLLKYNLSL GGDIILQFIE | |
| | IADNRLTIGS PSKIYNSLGQ | |
| | PVFYQASYSW DTMIKLGDVD TVDPLRVQWR | |
| | NNSVISRPGQ SQCPRFNVCP EVCWEGTYND | |
| | AFLIDRLNWV SAGVYLNSNQ TAENPVFAVF | |
| | KDNEILYQVP LAEDDTNAQK TITDCFLLEN | |
| | VIWCISLVEI YDIGDSVIRP KLFAVKIPAQ CSES | |
| 9291 | MVVILDKRCY CNLLILILMI SECSVG | Signal sequence |
| 9292 | GGGGGS | Peptide linker |
| 9293 | (GGGGS)n wherein n is 1 to 10 | Peptide linker |
| 9294 | GGGGS | Peptide linker |
| 9295 | PAENKKVR FENTTSDKGK IPSKVIKSYY | NiVG protein |
| | GTMDIKKINE GLLDSKILSA FNTVIALLGS | attachment |
| | IVIIVMNIMI IQNYTRSTDN QAVIKDALQG | glycoprotein (602 aa) |
| | IQQQIKGLAD KIGTEIGPKV SLIDTSSTIT | Without N-terminal |
| | IPANIGLLGS KISQSTASIN ENVNEKCKFT | methionine |
| | LPPLKIHECN ISCPNPLPFR EYRPQTEGVS | |
| | NLVGLPNNIC LQKTSNQILK PKLISYTLPV | |
| | VGQSGTCITD PLLAMDEGYF AYSHLERIGS | |
| | CSRGVSKQRI IGVGEVLDRG DEVPSLFMIN | |
| | VWTPPNPNTV YHCSAVYNNE FYYVLCAVST | |
| | VGDPILNSTY WSGSLMMTRL AVKPKSNGGG | |
| | YNQHQLALRS IEKGRYDKVM PYGPSGIKQG | |
| | DTLYFPAVGF LVRTEFKYND SNCPITKCQY | |
| | SKPENCRLSM GIRPNSHYIL RSGLLKYNLS | |
| | DGENPKVVFI EISDQRLSIG SPSKIYDSLG | |
| | QPVFYQASFS WDTMIKFGDV LTVNPLVVNW | |
| | RNNTVISRPG QSQCPRENTC PEICWEGVYN | |
| | DAFLIDRINW ISAGVELDSN QTAENPVFTV | |
| | FKDNEILYRA QLASEDTNAQ KTITNCFLLK | |
| | NKIWCISLVE IYDTGDNVIR PKLFAVKIPE QC | |
| 9296 | KVR FENTTSDKGK IPSKVIKSYY GTMDIKKINE | NiVG protein |
| | GLLDSKILSA FNTVIALLGS IVIIVMNIMI | attachment |
| | IQNYTRSTDN QAVIKDALQG IQQQIKGLAD | glycoprotein |
| | KIGTEIGPKV SLIDTSSTIT IPANIGLLGS | Truncated Δ5 Without |
| | KISQSTASIN ENVNEKCKFT LPPLKIHECN | N-terminal methionine |
| | ISCPNPLPFR EYRPQTEGVS NLVGLPNNIC | |
| | LQKTSNQILK PKLISYTLPV VGQSGTCITD | |
| | PLLAMDEGYF AYSHLERIGS CSRGVSKQRI | |
| | IGVGEVLDRG DEVPSLFMIN VWTPPNPNTV | |
| | YHCSAVYNNE FYYVLCAVST VGDPILNSTY | |
| | WSGSLMMTRL AVKPKSNGGG YNQHQLALRS | |
| | IEKGRYDKVM PYGPSGIKQG DTLYFPAVGF | |
| | LVRTEFKYND SNCPITKCQY SKPENCRLSM | |
| | GIRPNSHYIL RSGLLKYNLS DGENPKVVFI | |
| | EISDQRLSIG SPSKIYDSLG QPVFYQASFS | |
| | WDTMIKFGDV LTVNPLVVNW RNNTVISRPG | |
| | QSQCPRENTC PEICWEGVYN DAFLIDRINW | |
| | ISAGVFLDSN QTAENPVFTV FKDNEILYRA | |
| | QLASEDTNAQ KTITNCFLLK NKIWCISLVE | |
| | IYDTGDNVIR PKLFAVKIPE QC | |
| 9297 | NTTSDKGK IPSKVIKSYY GTMDIKKINE | NiVG protein |
| | GLLDSKILSA FNTVIALLGS IVIIVMNIMI | attachment |
| | IQNYTRSTDN QAVIKDALQG IQQQIKGLAD | glycoprotein |
| | KIGTEIGPKV SLIDTSSTIT IPANIGLLGS | Truncated Δ10 |
| | KISQSTASIN ENVNEKCKFT LPPLKIHECN | Without N-terminal |
| | ISCPNPLPFR EYRPQTEGVS NLVGLPNNIC | methionine |
| | LQKTSNQILK PKLISYTLPV VGQSGTCITD | |
| | PLLAMDEGYF AYSHLERIGS CSRGVSKQRI | |
| | IGVGEVLDRG DEVPSLFMIN VWTPPNPNTV | |
| | YHCSAVYNNE FYYVLCAVST VGDPILNSTY | |
| | WSGSLMMTRL AVKPKSNGGG YNQHQLALRS | |
| | IEKGRYDKVM PYGPSGIKQG DTLYFPAVGF | |
| | LVRTEFKYND SNCPITKCQY SKPENCRLSM | |
| | GIRPNSHYIL RSGLLKYNLS DGENPKVVFI | |
| | EISDQRLSIG SPSKIYDSLG QPVFYQASFS | |
| | WDTMIKFGDV LTVNPLVVNW RNNTVISRPG | |
| | QSQCPRENTC PEICWEGVYN DAFLIDRINW | |
| | ISAGVFLDSN QTAENPVFTV FKDNEILYRA | |
| | QLASEDTNAQ KTITNCFLLK NKIWCISLVE | |
| | IYDTGDNVIR PKLFAVKIPE QC | |
| 9298 | KGK IPSKVIKSYY GTMDIKKINE GLLDSKILSA | NiVG protein |
| | FNTVIALLGS IVIIVMNIMI IQNYTRSTDN | attachment |
| | QAVIKDALQG IQQQIKGLAD KIGTEIGPKV | glycoprotein |
| | SLIDTSSTIT IPANIGLLGS KISQSTASIN | Truncated Δ15 |
| | ENVNEKCKFT LPPLKIHECN ISCPNPLPER | Without N-terminal |
| | EYRPQTEGVS NLVGLPNNIC LQKTSNQILK | methionine |
| | PKLISYTLPV VGQSGTCITD PLLAMDEGYF | |
| | AYSHLERIGS CSRGVSKQRI IGVGEVLDRG | |
| | DEVPSLFMIN VWTPPNPNTV YHCSAVYNNE | |
| | FYYVLCAVST VGDPILNSTY WSGSLMMTRL | |
| | AVKPKSNGGG YNQHQLALRS IEKGRYDKVM | |
| | PYGPSGIKQG DTLYFPAVGF LVRTEFKYND | |
| | SNCPITKCQY SKPENCRLSM GIRPNSHYIL | |
| | RSGLLKYNLS DGENPKVVFI EISDQRLSIG | |
| | SPSKIYDSLG QPVFYQASFS WDTMIKFGDV | |
| | LTVNPLVVNW RNNTVISRPG QSQCPRENTC | |
| | PEICWEGVYN DAFLIDRINW ISAGVELDSN | |
| | QTAENPVFTV FKDNEILYRA QLASEDINAQ | |
| | KTITNCFLLK NKIWCISLVE IYDTGDNVIR | |
| | PKLFAVKIPE QC | |
| 9299 | SKVIKSYY GTMDIKKINE GLLDSKILSA | NiVG protein |
| | FNTVIALLGS IVIIVMNIMI IQNYTRSTDN | attachment |
| | QAVIKDALQG IQQQIKGLAD KIGTEIGPKV | glycoprotein |
| | SLIDTSSTIT IPANIGLLGS KISQSTASIN | Truncated Δ20 |
| | ENVNEKCKFT LPPLKIHECN ISCPNPLPER | Without N-terminal |
| | EYRPQTEGVS NLVGLPNNIC LQKTSNQILK | methionine |
| | PKLISYTLPV VGQSGTCITD PLLAMDEGYF | |
| | AYSHLERIGS CSRGVSKQRI IGVGEVLDRG | |
| | DEVPSLFMTN VWTPPNPNTV YHCSAVYNNE | |
| | FYYVLCAVST VGDPILNSTY WSGSLMMTRL | |
| | AVKPKSNGGG YNQHQLALRS IEKGRYDKVM | |
| | PYGPSGIKQG DTLYFPAVGF LVRTEFKYND | |
| | SNCPITKCQY SKPENCRLSM GIRPNSHYIL | |
| | RSGLLKYNLS DGENPKVVFI EISDQRLSIG | |
| | SPSKIYDSLG QPVFYQASFS WDTMIKFGDV | |
| | LTVNPLVVNW RNNTVISRPG QSQCPRFNTC | |
| | PEICWEGVYN DAFLIDRINW ISAGVFLDSN | |
| | QTAENPVFTV FKDNEILYRA QLASEDINAQ | |
| | KTITNCFLLK NKIWCISLVE IYDTGDNVIR | |
| | PKLFAVKIPE QC | |
| 9300 | SYY GTMDIKKINE GLLDSKILSA FNTVIALLGS | NiVG protein |
| | IVIIVMNIMI IQNYTRSTDN QAVIKDALQG | attachment |
| | IQQQIKGLAD KIGTEIGPKV SLIDTSSTIT | glycoprotein |
| | IPANIGLLGS KISQSTASIN ENVNEKCKFT | Truncated Δ25 |
| | LPPLKIHECN ISCPNPLPFR EYRPQTEGVS | Without N-terminal |
| | NLVGLPNNIC LQKTSNQILK PKLISYTLPV | methionine |
| | VGQSGTCITD PLLAMDEGYF AYSHLERIGS | |
| | CSRGVSKQRI IGVGEVLDRG DEVPSLFMTN | |
| | VWTPPNPNTV YHCSAVYNNE FYYVLCAVST | |
| | VGDPILNSTY WSGSLMMTRL AVKPKSNGGG | |
| | YNQHQLALRS IEKGRYDKVM PYGPSGIKQG | |
| | DTLYFPAVGF LVRTEFKYND SNCPITKCQY | |
| | SKPENCRLSM GIRPNSHYIL RSGLLKYNLS | |
| | DGENPKVVFI EISDQRLSIG SPSKIYDSLG | |
| | QPVFYQASFS WDTMIKFGDV LTVNPLVVNW | |
| | RNNTVISRPG QSQCPRENTC PEICWEGVYN | |
| | DAFLIDRINW ISAGVELDSN QTAENPVFTV | |
| | FKDNEILYRA QLASEDINAQ KTITNCFLLK | |
| | NKIWCISLVE IYDTGDNVIR PKLFAVKIPE QC | |
| 9301 | TMDIKKINE GLLDSKILSA FNTVIALLGS | NiVG protein |
| | IVIIVMNIMI IQNYTRSTDN QAVIKDALQG | attachment |
| | IQQQIKGLAD KIGTEIGPKV SLIDTSSTIT | glycoprotein |
| | IPANIGLLGS KISQSTASIN ENVNEKCKFT | Truncated Δ30 |
| | LPPLKIHECN ISCPNPLPER EYRPQTEGVS | Without N-terminal |
| | NLVGLPNNIC LQKTSNQILK PKLISYTLPV | methionine |
| | VGQSGTCITD PLLAMDEGYF AYSHLERIGS | |
| | CSRGVSKQRI IGVGEVLDRG DEVPSLEMTN | |
| | VWTPPNPNTV YHCSAVYNNE FYYVLCAVST | |
| | VGDPILNSTY WSGSLMMTRL AVKPKSNGGG | |
| | YNQHQLALRS IEKGRYDKVM PYGPSGIKQG | |
| | DTLYFPAVGF LVRTEFKYND SNCPITKCQY | |
| | SKPENCRLSM GIRPNSHYIL RSGLLKYNLS | |
| | DGENPKVVFI EISDQRLSIG SPSKIYDSLG | |
| | QPVFYQASFS WDTMIKFGDV LTVNPLVVNW | |
| | RNNTVISRPG QSQCPRENTC PEICWEGVYN | |
| | DAFLIDRINW ISAGVELDSN QTAENPVFTV | |
| | FKDNEILYRA QLASEDTNAQ KTITNCFLLK | |
| | NKIWCISLVE IYDTGDNVIR PKLFAVKIPE QC | |
| 9302 | KKINEGLLDSKILSA FNTVIALLGS IVIIVMNIMI | NiVG protein |
| | IQNYTRSTDN QAVIKDALQG IQQQIKGLAD | attachment |
| | KIGTEIGPKV SLIDTSSTIT IPANIGLLGS | glycoprotein |
| | KISQSTASIN ENVNEKCKFT LPPLKIHECN | Truncated and |
| | ISCPNPLPFR EYRPQTEGVS NLVGLPNNIC | mutated |
| | LQKTSNQILK PKLISYTLPV VGQSGTCITD | (E501 A, W504A, |
| | PLLAMDEGYF AYSHLERIGS CSRGVSKQRI | Q530A, E533A) NIV G |
| | IGVGEVLDRG DEVPSLFMTN VWTPPNPNTV | protein (Gc Δ 34) |
| | YHCSAVYNNE FYYVLCAVST VGDPILNSTY | Without N-terminal |
| | WSGSLMMTRL AVKPKSNGGG YNQHQLALRS | methionine |
| | IEKGRYDKVM PYGPSGIKQG DTLYFPAVGF | |
| | LVRTEFKYND SNCPITKCQY SKPENCRLSM | |
| | GIRPNSHYIL RSGLLKYNLS DGENPKVVFI | |
| | EISDQRLSIG SPSKIYDSLG QPVFYQASFS | |
| | WDTMIKFGDV LTVNPLVVNW RNNTVISRPG | |
| | QSQCPRENTC PAICAEGVYN DAFLIDRINW | |
| | ISAGVFLDSN ATAANPVFTV FKDNEILYRA | |
| | QLASEDTNAQ KTITNCFLLK NKIWCISLVE | |
| | IYDTGDNVIR PKLFAVKIPE QCT | |
| 9303 | MADSKLVSL NNNLSGKIKD QGKVIKNYYG | Hendra virus G protein |
| | TMDIKKINDG LLDSKILGAF | Uniprot O89343 |
| | NTVIALLGSI IIIVMNIMII QNYTRTTDNQ | Without N-terminal |
| | ALIKESLQSV QQQIKALTDK IGTEIGPKVS | methionine |
| | LIDTSSTITI PANIGLLGSK ISQSTSSINE | |
| | NVNDKCKFTL | |
| | PPLKIHECNI SCPNPLPFRE YRPISQGVSD | |
| | LVGLPNQICL QKTTSTILKP RLISYTLPIN | |
| | TREGVCITDP LLAVDNGFFA YSHLEKIGSC | |
| | TRGIAKQRII GVGEVLDRGD KVP SMFMTNV | |
| | WTPPNPSTIH HCSSTYHEDF YYTLCAVSHV | |
| | GDPILNSTSW TESLSLIRLA VRPKSDSGDY | |
| | NQKYIAITKV ERGKYDKVMP | |
| | YGPSGIKQGD TLYFPAVGFL PRTEFQYNDS | |
| | NCPIIHCKYS KAENCRLSMG | |
| | VNSKSHYILR SGLLKYNLSL GGDIILQFIE | |
| | IADNRLTIGS PSKIYNSLGQ PVFYQASYSW | |
| | DTMIKLGDVD TVDPLRVQWR NNSVISRPGQ | |
| | SQCPRFNVCP | |
| | EVCWEGTYND AFLIDRLNWV SAGVYLNSNQ | |
| | TAENPVFAVF KDNEILYQVP LAEDDINAQK | |
| | TITDCFLLEN VIWCISLVEI YDTGDSVIRP | |
| | KLFAVKIPAQ CSES | |
| 9304 | KKINEGLLDSKILSA FNTVIALLGS IVIIVMNIMI | NiVG protein |
| | IQNYTRSTDN QAVIKDALQG IQQQIKGLAD | attachment |
| | KIGTEIGPKV SLIDTSSTIT IPANIGLLGS | glycoprotein |
| | KISQSTASIN ENVNEKCKFT LPPLKIHECN | Truncated (Gc Δ 34) |
| | ISCPNPLPER EYRPQTEGVS NLVGLPNNIC | Without N-terminal |
| | LQKTSNQILK PKLISYTLPV VGQSGICITD | methionine |
| | PLLAMDEGYF AYSHLERIGS CSRGVSKQRI | |
| | IGVGEVLDRG DEVPSLFMIN VWTPPNPNTV | |
| | YHCSAVYNNE FYYVLCAVST VGDPILNSTY | |
| | WSGSLMMTRL AVKPKSNGGG YNQHQLALRS | |
| | IEKGRYDKVM PYGPSGIKQG DTLYFPAVGF | |
| | LVRTEFKYND SNCPITKCQY SKPENCRLSM | |
| | GIRPNSHYIL RSGLLKYNLS DGENPKVVFI | |
| | EISDQRLSIG SPSKIYDSLG QPVFYQASFS | |
| | WDTMIKFGDV LTVNPLVVNW RNNTVISRPG | |
| | QSQCPRENTC PEICWEGVYN DAFLIDRINW | |
| | ISAGVFLDSN QTAENPVFTV FKDNEILYRA | |
| | QLASEDTNAQ KTITNCFLLK NKIWCISLVE | |
| | IYDTGDNVIR PKLFAVKIPE QCT | |
| 9305 | LSQLQKNYLDNSNQQGDKMNNPDKKLSVNFNPLELDKGQK | gb: JQ001776:8170- |
| | DLNKSYYVKNKNYNVSNLLNESLHDIKFCIYCIFSLLIII | 10275\|Organism: Cedar |
| | TIINIITISIVITRLKVHEENNGMESPNLQSIQDSLSSLT | virus\|Strain |
| | NMINTEITPRIGILVTATSVTLSSSINYVGTKTNQLVNEL | Name: CG1a\|Protein |
| | KDYITKSCGFKVPELKLHECNISCADPKISKSAMYSTNAY | Name: attachment |
| | AELAGPPKIFCKSVSKDPDFRLKQIDYVIPVQQDRSICMN | glycoprotein\|Gene |
| | NPLLDISDGFFTYIHYEGINSCKKSDSFKVLLSHGEIVDR | Symbol: G Without N- |
| | GDYRPSLYLLSSHYHPYSMQVINCVPVTCNQSSFVFCHIS | terminal methionine |
| | NNTKTLDNSDYSSDEYYITYFNGIDRPKTKKIPINNMTAD | |
| | NRYIHFTFSGGGGVCLGEEFIIPVTTVINTDVFTHDYCES | |
| | FNCSVQTGKSLKEICSESLRSPINSSRYNLNGIMIISQNN | |
| | MTDFKIQLNGITYNKLSFGSPGRLSKTLGQVLYYQSSMSW | |
| | DTYLKAGFVEKWKPFTPNWMNNTVISRPNQGNCPRYHKCP | |
| | EICYGGTYNDIAPLDLGKDMYVSVILDSDQLAENPEITVF | |
| | NSTTILYKERVSKDELNTRSTTTSCFLFLDEPWCISVLET | |
| | NRFNGKSIRPEIYSYKIPKYC | |
| 9306 | PQKTVEFINMNSPLERGVSTLSDKKTLNQSKITKQGYFGL | gb: NC_025256:9117- |
| | GSHSERNWKKQKNQNDHYMTVSTMILEILVVLGIMENLIV | 11015\|Organism: Bat |
| | LTMVYYQNDNINQRMAELISNITVLNLNLNQLINKIQREI | Paramyxovirus |
| | IPRITLIDTATTITIPSAITYILATLTTRISELLPSINQK | Eid_hel/GH- |
| | CEFKTPTLVLNDCRINCTPPLNPSDGVKMSSLATNLVAHG | M74a/GHA/2009\|Strain |
| | PSPCRNFSSVPTIYYYRIPGLYNRTALDERCILNPRLTIS | Name: BatPV/Eid_hel/ |
| | STKFAYVHSEYDKNCTRGFKYYELMTFGEILEGPEKEPRM | GH- |
| | FSRSFYSPTNAVNYHSCTPIVTVNEGYFLCLECTSSDPLY | M74a/GHA/2009\|Protein |
| | KANLSNSTFHLVILRHNKDEKIVSMPSFNLSTDQEYVQII | Name: glycoprotein\|Gene |
| | PAEGGGTAESGNLYFPCIGRLLHKRVTHPLCKKSNCSRID | Symbol: G Without |
| | DESCLKSYYNQGSPQHQVVNCLIRIRNAQRDNPTWDVITV | N-terminal methionine |
| | DLTNTYPGSRSRIFGSFSKPMLYQSSVSWHILLQVAEITD | |
| | LDKYQLDWLDTPYISRPGGSECPFGNYCPTVCWEGTYNDV | |
| | YSLTPNNDLFVTVYLKSEQVAENPYFAIFSRDQILKEFPL | |
| | DAWISSARTTTISCFMFNNEIWCIAALEITRLNDDIIRPI | |
| | YYSFWLPTDCRTPYPHTGKMTRVPLRSTYNY | |
| 9307 | ATNRDNTITSAEVSQEDKVKKYYGVETAEKVADSISGNKV | gb: NC_025352:8716- |
| | FILMNTLLILTGAIITITLNITNLTAAKSQQNMLKIIQDD | 11257\|Organism: |
| | VNAKLEMFVNLDQLVKGEIKPKVSLINTAVSVSIPGQISN | Mojiang virus\|Strain |
| | LQTKFLQKYVYLEESITKQCTCNPLSGIFPTSGPTYPPTD | Name: Tongguan1\| |
| | KPDDDTTDDDKVDTTIKPIEYPKPDGCNRTGDHFTMEPGA | Protein Name: |
| | NFYTVPNLGPASSNSDECYINPSFSIGSSIYMFSQEIRKT | attachment |
| | DCTAGEILSIQIVLGRIVDKGQQGPQASPLLVWAVPNPKI | glycoprotein\|Gene |
| | INSCAVAAGDEMGWVLCSVTLTAASGEPIPHMEDGFWLYK | Symbol: G Without N- |
| | LEPDTEVVSYRITGYAYLLDKQYDSVFIGKGGGIQKGNDL | terminal methionine |
| | YFQMYGLSRNRQSFKALCEHGSCLGTGGGGYQVLCDRAVM | |
| | SFGSEESLITNAYLKVNDLASGKPVIIGQTFPPSDSYKGS | |
| | NGRMYTIGDKYGLYLAPSSWNRYLRFGITPDISVRSTTWL | |
| | KSQDPIMKILSTCTNTDRDMCPEICNTRGYQDIFPLSEDS | |
| | EYYTYIGITPNNGGTKNFVAVRDSDGHIASIDILQNYYSI | |
| | TSATISCFMYKDEIWCIAITEGKKQKDNPQRIYAHSYKIR | |
| | QMCYNMKSATVTVGNAKNITIRRY | |
| 9308 | DFDKLNKIGVVQGRVLNYKIKGDPMTKDLVLKFIPNIVNI | gb: JQ001776:6129- |
| | TECVREPLSRYNETVRRLLLPIHNMLGLYLNNTNAKMTGL | 8166\|Organism: Cedar |
| | MIAGVIMGGIAIGIATAAQITAGFALYEAKKNTENIQKLT | virus\|Strain |
| | DSIMKTQDSIDKLTDSVGTSILILNKLQTYINNQLVPNLE | Name: CG1a\|Protein |
| | LLSCRQNKIEFDLMLTKYLVDLMTVIGPNINNPVNKDMTI | Name: fusion |
| | QSLSLLFDGNYDIMMSELGYTPQDFLDLIESKSITGQIIY | glycoprotein\|Gene |
| | VDMENLYVVIRTYLPTLIEVPDAQIYEFNKITMSSNGGEY | Symbol: F (without |
| | LSTIPNFILIRGNYMSNIDVATCYMTKASVICNQDYSLPM | signal sequence) |
| | SQNLRSCYQGETEYCPVEAVIASHSPRFALINGVIFANCI | |
| | NTICRCQDNGKTITQNINQFVSMIDNSTCNDVMVDKFTIK | |
| | VGKYMGRKDINNINIQIGPQIIIDKVDLSNEINKMNQSLK | |
| | DSIFYLREAKRILDSVNISLISPSVQLFLIIISVLSFIIL | |
| | LIIIVYLYCKSKHSYKYNKFIDDPDYYNDYKRERINGKAS | |
| | KSNNIYYVGD | |
| 9309 | SRALLRETDNYSNGLIVENLVRNCHHPSKNNLNYTKTQKR | gb: NC_025256:6865- |
| | DSTIPYRVEERKGHYPKIKHLIDKSYKHIKRGKRRNGHNG | 8853\|Organism: Bat |
| | NIITIILLLILILKTQMSEGAIHYETLSKIGLIKGITREY | Paramyxovirus |
| | KVKGTPSSKDIVIKLIPNVTGLNKCTNISMENYKEQLDKI | Eid_hel/GH- |
| | LIPINNIIELYANSTKSAPGNARFAGVIIAGVALGVAAAA | M74a/GHA/2009\|Strain |
| | QITAGIALHEARQNAERINLLKDSISATNNAVAELQEATG | Name: BatPV/Eid_hel/ |
| | GIVNVITGMQDYINTNLVPQIDKLQCSQIKTALDISLSQY | GH- |
| | YSEILTVFGPNLQNPVTTSMSIQAISQSFGGNIDLLLNLL | M74a/GHA/2009\|Protein |
| | GYTANDLLDLLESKSITGQITYINLEHYFMVIRVYYPIMT | Name: fusion |
| | TISNAYVQELIKISFNVDGSEWVSLVPSYILIRNSYLSNI | protein\|Gene |
| | DISECLITKNSVICRHDFAMPMSYTLKECLTGDTEKCPRE | Symbol: F (without |
| | AVVTSYVPRFAISGGVIYANCLSTTCQCYQTGKVIAQDGS | signal sequence) |
| | QTLMMIDNQTCSIVRIEEILISTGKYLGSQEYNTMHVSVG | |
| | NPVFTDKLDITSQISNINQSIEQSKFYLDKSKAILDKINL | |
| | NLIGSVPISILFIIAILSLILSIITFVIVMIIVRRYNKYT | |
| | PLINSDPSSRRSTIQDVYIIPNPGEHSIRSAARSIDRDRD | |
| 9310 | ILHY EKLSKIGLVK GITRKYKIKS | Hendra virus F protein |
| | NPLTKDIVIK MIPNVSNVSK CTGTVMENYK | Uniprot O89342 |
| | SRLIGILSPI KGAIELYNNN | (without signal |
| | THDLVGDVKL AGVVMAGIAI GIATAAQITA | sequence) |
| | GVALYEAMKN ADNINKLKSS | |
| | IESTNEAVVK LQETAEKTVY VLTALQDYIN | |
| | TNLVPTIDQI SCKQTELALD | |
| | LALSKYLSDL LFVFGPNLQD PVSNSMTIQA | |
| | ISQAFGGNYE TLLRTLGYAT EDFDDLLESD | |
| | SIAGQIVYVD LSSYYIIVRV YFPILTEIQQ | |
| | AYVQELLPVS | |
| | FNNDNSEWIS IVPNFVLIRN TLISNIEVKY | |
| | CLITKKSVIC NQDYATPMTA | |
| | SVRECLIGST DKCPRELVVS SHVPRFALSG | |
| | GVLFANCISV TCQCQTTGRA ISQSGEQTLL | |
| | MIDNTTCTTV VLGNIIISLG KYLGSINYNS | |
| | ESIAVGPPVY | |
| | TDKVDISSQI SSMNQSLQQS KDYIKEAQKI | |
| | LDTVNPSLIS MLSMIILYVL | |
| | SIAALCIGLI TFISFVIVEK KRGNYSRLDD | |
| | RQVRPVSNGD LYYIGT | |
| 9311 | IHYDSLSKVGVIKGLTYNYKIKGSPSTKLMVVKLIPNIDS | gb: NC_025352:5950- |
| | VKNCTQKQYDEYKNLVRKALEPVKMAIDTMLNNVKSGNNK | 8712\|Organism: Mojiang |
| | YRFAGAIMAGVALGVATAATVTAGIALHRSNENAQAIANM | virus\|Strain |
| | KSAIQNTNEAVKQLQLANKQTLAVIDTIRGEINNNIIPVI | Name: Tongguan1\| |
| | NQLSCDTIGLSVGIRLTQYYSEIITAFGPALQNPVNTRIT | Protein Name: fusion |
| | IQAISSVENGNFDELLKIMGYTSGDLYEILHSELIRGNII | protein\|Gene |
| | DVDVDAGYIALEIEFPNLILVPNAVVQELMPISYNIDGDE | Symbol: F (without |
| | WVTLVPRFVLTRTILLSNIDTSRCTITDSSVICDNDYALP | signal sequence) |
| | MSHELIGCLQGDTSKCAREKVVSSYVPKFALSDGLVYANC | |
| | LNTICRCMDTDTPISQSLGATVSLLDNKRCSVYQVGDVLI | |
| | SVGSYLGDGEYNADNVELGPPIVIDKIDIGNQLAGINQTL | |
| | QEAEDYIEKSEEFLKGVNPSIITLGSMVVLYIFMILIAIV | |
| | SVIALVLSIKLTVKGNVVRQQFTYTQHVP SMENINYVSH | |
| 9312 | (GGGS)n wherein n is 1 to 10 | Peptide linker |
| 9313 | GGGGSGGGGSGGGGS | Peptide linker |
| 9314 | TTAASGSSGGSSSGA | Peptide linker |
| 9315 | GSTSGSGKPGSGEGSTKG | Peptide linker |

The application's sequence listing, which the Patent Office published only in electronic form, follows.

SEQUENCE LISTING (14127 sequences)

SEQ ID NO: 1 - protein, 241 aa, synthetic construct
QVQLQQSGAELMKPGASVKISCKATGYTFSSYWIEWVKQRPGHGLEWIGEIFPGSGHTSFNEKFKGKATFTADTSSNTAYIQLSSLTSEDSAVYYCARRGYGYDEGFDYWGQGTTLTVSSGGGSGGGGSGGGGSDIKMTQSPSSMYASLGERVTITCKASQDINSYLSWFQQKPGKSPKTLIYRANRLVDGVPSRFSGSGSGQDYSLTISSLEYEDMGIYYCLQYDEFPPTFGAGTKLELK

SEQ ID NO: 2 - protein, 241 aa, synthetic construct
QVQLQQSGAELMKPGASVKISCKATGYTLSSYWIEWVKQRPGHGLEWIGEILPGSGSTSYNEKFKGKATFTADTSSSTAYMQLSSLTSEDSAVYYCARRGYGYDEGFDYWGQGTTLTVSSGGGSGGGGSGGGGSDIKMTQSPSSMYASLGERVTITCKASQDINSYLSWFQQKPGKSPKTLIYRANRLVDGVPSRFSGSGSGQDYSLTISSLEYEDMGIYYCLQYDEFPPTFGAGTKLELK

SEQ ID NO: 3 - protein, 229 aa, synthetic construct
LVKTGASVKISCKASGYSFTGYYMHWVKQSHGKSLEWIGYISSYNGATSYNQKFKGKATFTVDTSSSTAYMQFNSLTSEDSAVYYCARGRYGEYFDYWGQGTTLTVSSGGGSGGGGSGGGGSDIQMTQSPASLSVSVGETVTITCRASENIYSNLAWYQQKQGKSPQLLVFAATYLADGVPSRFSGSGSGTQYSLKINSLQSEDFGNYYCQHFWGTPWTFGGGTKLEIK

SEQ ID NO: 4 - protein, 229 aa, synthetic construct
LVKTGASVKISCKASGYSFTGYYMHWVKQSHGKSLEWIGYISSYNGVTGYNQKFKGKATFTVDTSSSTAYMQFNSLTSEDSAVYYCARGRYGDYFDYWGQGTTLTVSSGGGSGGGGSGGGGSDIQMTQSPASLSVSVGETVTITCRASENIYSNLAWYQQKQGKSPQLLVYAATNLADGVPSRFSGSGSGTQYSLKINSLQSEDFGSYYCQHFWGTPWTFGGGTKLEIK

SEQ ID NO: 5 - protein, 229 aa, synthetic construct
LVKTGASVKISCKASGYSFTGYYMHWVKQSHGKSLEWIGYISSYNGVTSYNQKFKGKATFTVDTSSSTAYMHFNSLTSEDSAVYYCARGRYGDYFDYWGQGTTLTVSSGGGSGGGGSGGGGSDIQMTQSPASLSVSVGETVTITCRASENIYSNLAWYQQKQGKSPQVLVYAATNLADGVPSRFSGSGSGTQYSLKINSLQSEDFGSYYCQHFWGSPWTFGGGTKLEIK

SEQ ID NO: 6 - protein, 229 aa, synthetic construct
LVKTGASVKISCKASGYSFTGYYMHWVKQSHGKSLEWIGYISSYNGVTGYNQKFKGKATFTVDTSSSTAYMQFNSLTSEDSAVYYCARGRYGDYFDYWGQGTTLTVSSGGGSGGGGSGGGGSDIQMTQSPASLSVSVGETVTITCRASENIYSNLAWYQQKQGKSPRLLVYAATNLADGVPSRFSGSGSGTQYSLKITSLQSEDFGSYYCQHFWGTPWTFGGGTKLEIK

SEQ ID NO: 7 - protein, 229 aa, synthetic construct
LVKTGASVKISCKASGYSFTGYYMHWVKQSHGKSLEWIGYISSYNGANGYNQKFKGKATFTVDTSSSTAYMQFNSLTSEDSAVYYCARGRYGDYFDYWGQGTTLTVSSGGGSGGGGSGGGGSDIQMTQSPASLSVSVGETVTITCRASENIYSNLAWYQQKQGKSPQLLVYAATNLADGVPSRFSGSGSGTQYSLKINSLQSEDFGSYYCQHFWGTPWTFGGGTKLEIK

SEQ ID NO: 8 - protein, 229 aa, synthetic construct
LVKTGASVKISCKASGYSFTGYYMHWVKQSHGKSLEWIGYISSYNGVTGYNQKFKGKATFTVDTSSSTAYMQFNSLTSEDSAVYYCARGRYGDYFDYWGQGTTLTVSSGGGSGGGGSGGGGSDIQMTQSPASLSVSVGETVTITCRASENIYSNLAWYQQKQGKSPQVLVYAATNVADGVPSRFSGSGSGTQYSLKINSLQSEDFGSYYCQHFWGTPWTFGGGTKLEIK

SEQ ID NO: 9 - protein, 229 aa, synthetic construct
LVKTGASVKISCKASGYSFTGYYMHWVKQSHGKSLEWIGYISSYNGVTGYNQKFKGKATFTVDTSSSTAYMQFNSLTSEDSAVYYCARGRYGDYFDYWGQGTTLTVSSGGGSGGGGSGGGGSDIQMTQSPASLSVSVGETVTITCRASDNIYSNLAWYQQKQGKSPQLLVYAATNLADGVPSRFSGSGSGTQYSLKINSLQSEDFGSYYCQHFWGTPWTFGGGTKLEIK

SEQ ID NO: 10 - protein, 229 aa, synthetic construct
LVKTGASVKISCKASGYSFTGYYMHWVKQSHGKSLEWIGYISSYNGVTGYNQKFKGKATFTVDTSSSTAYMQFNSLTSEDSAVYYCARGRYGDYFDYWGQGTTLTVSSGGGSGGGGSGGGGSDIQMTQSPASLSVSVGETVTITCRASENIYSNLAWYQQKQGKSPRLLVYAATNLADGVPSRFSGSGSGTQYSLKINSLQSEDFGSYYCQHFWGTPWTFGGGTKLEIK

SEQ ID NO: 11 - protein, 229 aa, synthetic construct
LVKTGASVKISCKASGYSFTGYYMHWVKQSHGKSLEWIGYISSYNGVTGYNQKFKGKATFTVDTSSSTAYMQFNSLTSEDSAVYYCARGRYGDYFDYWGQGTTLAVSSGGGSGGGGSGGGGSDIQMTQSPASLSVSVGETVTITCRASENIYSNLAWYQQKQGKSPQLLVYAATNLADGVPSRFSGSGSGTQYSLKINSLQSEDFGSYYCQHFWGTPWTFGGGTKLEIK

SEQ ID NO: 12 - protein, 229 aa, synthetic construct
LVKTGASVKISCKASGYSFTGFYMHWVKQSHGKGLEWIGYISSYNGATGYNQKFKGKATFTVDTSSSTAYMQFNSLTSEDSAVYYCARGRYGDYFDYWGQGTTLTVSSGGGSGGGGSGGGGSDIQMTQSPASLSVSVGETVTITCRASENIYSNLAWYQQKQGKSPQLLVFAATYLADGVPSRFSGSGSGTQYSLKINSLQSEDFGSYYCQHFWGTPWTFGGGTKLEIK

SEQ ID NO: 13 - protein, 229 aa, synthetic construct
LVKTGASVKISCKASGYSFTGYYMHWVKQSHGKSLEWIGYISSYNGATGYNQKFKGKATFTVDTSSSTAYMQFNSLTSEDSAVYYCARGRYGDYFDYWGQGTTLTVSSGGGSGGGGSGGGGSDIQMTQSPASLSVSVGETVTITCRASENIYSNLAWYQQKQGKSPQLLVYAATNLADGVPSRFSGSGSGTQYSLKINSLQSEDFGSYYCQHFWGSPWTFGGGTKLEIK

SEQ ID NO: 14 - protein, 239 aa, synthetic construct
QVQLQQPGAELVKPGASVKLSCKASGYTFTSYWMHWVKQRPGQGLEWIGMIHPNSGTTNYNEKFKSKATLTVDKSSSTAYMQLSSLTSEDSAVYYCARWGDGYSFAYWGQGTLVTVSAGGGSGGGGSGGGGSQIVLTQSPAIMSASPGEKVTMTCSASSSVSYMHWFQQKSGTSPKRWIYDTSKLASGVPARFSGSGSGTSYSLTFSSMEAEDAATYYCQQWSSNPLYTFGGGTKLEIK

SEQ ID NO: 15 - protein, 244 aa, synthetic construct
QVQLKQSGPELVKPGASVKMSCKASGYTFTDYVINWVKQRTGQGLEWIGEIYPGSGSSYYNEKFKGKATLTADKSSNTAYMQLSSLTSEDSAVYFCARRGERGPWFAYWGQGTLVTVSAGGGSGGGGSGGGGSDIVLTQSPASLAVSLGQRATISCKASQSVDYDGDSYMNWYQQKPGQPPKLLIYAASNLESGIPARFSGSGSGTDFTLNIHPVEEEDAATYYCQQSNEDPLTFGGGTKLELK

SEQ ID NO: 16 - protein, 238 aa, synthetic construct
QVQLQQPGAELIKPGASVKLSCKASGYTFTSYWMHWVKQRPGQGLEWIGMIHPNSGSTNYNEKFKSKATLTVDKSSSTAYMQLSSLTSEDSAVYYCARPGGYGFVYWGQGTLVTVSAGGGSGGGGSGGGGSEIQMTQSPSSMSASLGDRITITCQATQDIVKNLNWYQQKPGKPPSFLIYYATELAEGVPSRFSGSGSGSDYSLTINNLESEDFADYYCLQFYEFPLTFGAGTKLELK

SEQ ID NO: 17 - protein, 244 aa, synthetic construct
EVQLQQSGAELVKPGASVKLSCTPSGFNIKDTSLHWVKQGPEQGLEWIGRIDPANGNTKYDPKFQGKATITADTSSNTAYLQLSSLTSEDTAVYYCARGPDDGYFYYYSMDYWGQGTSVTVSSGGGSGGGGSGGGGSDIQMTQSPASLSVSVGETVTITCRASENIYSNLAWYQQKQGKSPQLLVYAATNLADGVPSRFSGSGSGTQYSLKINSLQSEDFGSYYCQHFWGTPWTFGGGTKLEIK

SEQ ID NO: 18 - protein, 245 aa, synthetic construct
QVQLQQSGPELKKPGETVKISCKASGYTFTNYGMNWVKQAPGKGLKWMGWINTYTGEPTYADDFKGRFAFSLETSASTAYLQINNLKNEDMATYFCARKYYDYEFAYWGQGTLVTVSAGGGSGGGGSGGGGSDIVMTQSPSSLAMSVGQKVTMSCKSSQSLLNSSNQKNYLAWYQQKPGQSPKLLVYFASTRESGVPDRFIGSGSGTDFTLTISSVQAEDLADYFCQQHYSTPLTFGAGTKLELK

SEQ ID NO: 19 - protein, 240 aa, synthetic construct
QVQLQESGGGLVKPGGSLKLSCAASGFTFSSYAMSWVRQTPEKRLEWVATISSGGSYTYYPDSVKGRFTISRDNAKNTLYLQMSSLRSEDTAMYYCARHEEANWAWFAYWGQGTLVTVSAGGGSGGGGSGGGGSQIVLTQSPAIMSASPGEKVTITCSASSSVSYMHWFQQKPGTSPKLWIYSTSNLASGVPARFSGSGSGTSYSLTISRMEAEDAATYYCQQRSSFPYTFGGGTKLEIK

SEQ ID NO: 20 - protein, 242 aa, synthetic construct
QVQLKQSGPGLVQPSQSLSITCTVSGFSLTSYGVHWVRQSPGKGLEWLGVIWSGGSTDYNAAFISRLSISKDNSKSQVFFKMNSLQANDTAIYYCASYYGSSRSYWYLDVWGAGTTVTVSSGGGSGGGGSGGGGSSIVMTQTPKFLLVSAGDRVTITCKASQSVSNDVAWYQQKPGQSPKLLIYYASNRYTGVPDRFTGSGYGTDFTFTISTVQAEDLAVYFCQQDYTSLPTFGAGTKLEIK

SEQ ID NO: 21 - protein, 241 aa, synthetic construct
QVKLVESGGDLVKPGGSLKLSCATSGFTFSSYGMSWVRQTPDKRLEWVATISSGGSYTYYPDSVKGRFTISRDNAKNTLYLQMSSLKSEGTAMYYCARHNYSNWDWFAYWGQGTLVTVSAGGGSGGGGSGGGGSDIQMTQSPSSLSASLGDTITITCHASQNINVWLSWYQQKPGNIPKLLIYKASNLHTGVPSRFSGSGSGTGFTLTISSLQPEDIATYYCQQGQSYPLTFGGGTNLEIK

SEQ ID NO: 22 - protein, 244 aa, synthetic construct
EVQLQQSGAELVKPGASVKLSCTPSGFNIKDTSLHWVKQGPEQGLEWIGRIDPANGNTKYDPKFQGKATITADTSSNTAYLQLSSLTSEDTAVYYCARGPDDGYFYYYSMDYWGQGTSVTVSSGGGSGGGGSGGGGSETTVTQSPASLSMAIGEKVTIRCITSTDIDDDMNWYQQKPGEPPKLLISEGNSLRPGVPSRFSSSGYGTDFVFTIENMLSEDVADYYCLQSDNLPLTFGAGTKLELK

SEQ ID NO: 23 - protein, 241 aa, synthetic construct
QVQLQQSGAELMKPGASVKISCKATGYTFSSYWIEWVKQRPGHGLEWIGEILPGSGSTSYNEKFKGKATFTADTSSNTAYMQLSSLTSEDSAVYYCARRGYGYDEGFDYWGQGTTLTVSSGGGSGGGGSGGGGSDIKMTQSPSSMYASLGERVTITCKASQDINSYLSWFQQKPGKSPKTLIYRANRLVDGVPSRFSGSGSGQDYSLTISSLEYEDMGIYYCLQYDEFPPTFGAGTKLELK

SEQ ID NO: 24 - protein, 239 aa, synthetic construct
QVQLQQPGAELVRPGASVKLSCKASGYTFTNYWMNWVKQRPGQGLEWIGLIDPSDSETHYNQVFKDKATLTVDKSSSTAYMQLSSLTSEDSAVYYCATYDVYYRFAYWGQGTLVTVSAGGGSGGGGSGGGGSDIQMTQSPSSLSASLGGKVTITCKASQDINKYIAWYQHKPGKGPSLLIHYTSTLQPGIPSRFSGSGSGRDYSFSISNLEPEDIATYYCLQYDNLMYTFGGGTKLEIK

SEQ ID NO: 25 - protein, 234 aa, synthetic construct
QVQLQQPGAELVRPGASVKLSCKASGYTFTSYWINWVKQRPGQGLEWIGNIYPSDSYTNYNQKFKDKATLTVDKSSSTAYMQLSSPTSEDSAVYYCTRGNYIDYWGQGTTLTVSSGGGSGGGGSGGGGSENVLTQSPAIMSASLGEKVTMSCRASSSVNYMYWYQQKSDASPKLWIYYTSNLAPGVPGRFSGSGSGNSYSLTISSMEGEDAATYYCQQFTSSHTFGGGTKLEIK

SEQ ID NO: 26 - protein, 245 aa, synthetic construct
QVQLKESGPGLVAPSQSLSIPCTVSGFSLTSYGVHWVRQPPGKGLEWLGVIWAGGTTNYNSALMSRLSISKDNSKSQVFLKMYSLQTDDTAMYYCARGDGYDDGYAMDYWGQGTSVTVSSGGGSGGGGSGGGGSDIVLTQSPASLAVSLGQRATISCRASQSVSTSSYSYMHWYQQKPGQPPKLLIKYASNLESGVPARFSGSGSGTDFTLNIHPVEEEDTATYYCQHSWEIPLTFGAGTKLELK

SEQ ID NO: 27 - protein, 243 aa, synthetic construct
QVQLQQSGAELVKPGASVKLSCKASGSTFTTYYIYWVKQRPGQGLEWIGEINPSNGGTNFNEKFKSKATLTVDKSSSTAYMQLSSLTSEDSAVYYCTSYYTHETYYYAMDYWGQGTSVTVSSGGGSGGGGSGGGGSETTVTQSPASLSVATGEKVSIRCMTSIDIDDDMNWYQQKPGEPPKLLISEGNTLRPGVPSRFSSSGYGTDFVFTIENTLSEDVADYYCLQSDNMPFTFGSGTKLEIK

SEQ ID NO: 28 - protein, 245 aa, synthetic construct
QVQLQQPGAELVKPGASVKLSCKASGYTFTSYWMQWVKQRPGQGLEWIGEIDPSDSYTNYNQKFKGKATLTVDTSSSTAYMQLSSLTSEDSAVYYCARAEYGYGNYPWFAYWGQGTLVTVSAGGGSGGGGSGGGGSQAVVTQESALTTSPGGTVILTCRSSTGAVTTSNYANWVQEKPDHLFTGLIGGTSNRAPGVPVRFSGSLIGDKAALTITGAQTEDDAMYFCALWYSTHWVFGGGTKLTVL

SEQ ID NO: 29 - protein, 242 aa, synthetic construct
QVQLQQPGAELVKPGASVKVSCKASGYTFTSYWMHWVKQRPGQGLEWIGRIHPSDSDTNYNQKFKGKATLTVDKSSSTAYMQLSSLTSEDSAVYYCAIPYYYGGWYFDVWGTGTTVTVSSGGGSGGGGSGGGGSQAVVTQESALTTSPGETVTLTCRSSTGAVTTSNYANWVQEKPDHLFTGLIGGTNNRAPGVPARFSGSLIGDKAALTITGAQTEDEAIYFCALWYSNHLFGSGTKVTVL

SEQ ID NO: 30 - protein, 243 aa, synthetic construct
EVKLVESGGDLVKPGGSLKLSCAASGFTFSSYGMSWVRQTPDKRLEWVATISSGGSYTYYPDSVKGRFTISRDNAKNTLYLQMSSLKSEDTAMYYCARLYDAHWDYFDYWGQGTTLTVSSGGGSGGGGSGGGGSQAVVTQESALTTSPGETVTLTCRSSTGAVTTSNYANWVQEKPDHLFTGLIGGTNNRAPGVPARFSGSLIGDKAALTITGAQTEDEAIYFCALWYSNHWVFGGGTKLTVL

SEQ ID NO: 31 - protein, 241 aa, synthetic construct
QVQLQQPGSVLVRPGASVKLSCKASGYTFTSSWMHWAKQRPGQGLEWIGEIHPNSGNTNYNEKFKGKATLTVDTSSSTAYVDLSSLTSEDSAVYYCAIYYDYDAYYFDYWGQGTTLTVSSGGGSGGGGSGGGGSEIQMTQSPSSMSASLGDRITITCQATQDIVKNLNWYQQKPGKPPSFLIYYATELAEGVPSRFSGSGSGSDYSLTISNLESEDFADYYCLQFYEFPYTFGGGTKLEIK

SEQ ID NO: 32 - protein, 238 aa, synthetic construct
QVQLQQPGAELVKPGASVKLSCKASGYTFTSYWMHWVKQRPGQGLEWIGMIHPNSGSTNYNEKFKSKATLTVDKSSSTAYMQLSSLTSEDSAVYYCANPYYGYDVGYWGQGTTLTVSSGGGSGGGGSGGGGSQIVLTQSPAIMSASPGEKVTMTCSASSSVSYMYWYQQKPGSSPRLLIYDTSNLASGVPVRFSGSGSGTSYSLTISRMEAEDAATYYCQQWSSYPLTFGAGTKLELK

SEQ ID NO: 33 - protein, 241 aa, synthetic construct
EVQLVESGGDLVKPGGSLKLSCAASGFTFSSYGMSWVRQTPDKRLEWVATISSGGSYTYYPDSVKGRFTISRDNAKNTLYLQMSSLKSEDTAMYYCTRHDDSSYDWFAYWGQGTLVTVSAGGGSGGGGSGGGGSETTVTQSPASLSVATGEKVTIRCITSTDIDDDMNWYQQKPGEPPKLLISEGNTLRPGVPSRFFSGGYGTDFVFTIENTLSEDVADYYCLQSDNMPLMFGAGTKLELK

SEQ ID NO: 34 - protein, 237 aa, synthetic construct
QVQLQQPGAELVKPGASVKLSCKASGYTFTNYWMHWVKQRPGQGLEWIGMIHPNSGTTNYNEKFKSKATLTVDKSSSTTYMQLISLTSEDSAVYYCARFGDGYHFDYWGQGTTLTVSSGGGSGGGGSGGGGSQIVLTQSPAIMSASPGEKVTITCSASSSVSYMHWFQQRPGTSPKLWIYSTSNLASGVPARFSGSGSGTSYSLTISRMEAEDAATYYCQQRSTYPTFGGGTKLEIK

SEQ ID NO: 35 - protein, 237 aa, synthetic construct
QVQLQQSGPELKKPGETVKISCKASGYTFTNYGMNWVKQAPGKGLKWMGWINTNTGEPTYAEEFKGRFAFSLETSASTAYLQINNLKNEDTATYFCARWYPYFDYWGQGTTLTVSSGGGSGGGGSGGGGSEIQMTQSPSSMSASLGDRITITCQATQDIVKNLNWYQQKPGKPPSFLIYYATELAEGVPSRFSGSGSGSDYSLTISNLESEDFADYYCLQFYEFPYTFGGGTKLEIK

SEQ ID NO: 36 - protein, 242 aa, synthetic construct
QVQLQQSGAELAKPGASVKLSCKASGYTFTSYWMHWVKQRPGQGLEWIGYINPSSGYTKYNQKFKDKATLTADKSSSTAYMQLSSLTYEDSAVYYCARSDGSSGNWYFDVWGTGTTVTVSSGGGSGGGGSGGGGSDIQMTQSPASLSASVGETVTITCRASGNIHNYLAWYQQKQGKSPQLLVYNAKTLADGVPSRFSGSGSGTQYSLKINSLQPEDFGSYYCQHFWSTPWTFGGGTKLEIK

SEQ ID NO: 37 - protein, 241 aa, synthetic construct
QVQLQQPGAELVKPGASVKLSCKASGYTFTSYWMHWVKQRPGQGLEWIGMIHPNSGSTNYNEKFKSKATLTVDKSSSTAYMQLSSLTSEDSAVYYCARDYGNYDYAMDYWGQGTSVTVSSGGGSGGGGSGGGGSDIQMTQSPASLSVSVGETVTITCRASENIYSNLAWYQQKQGKSPQLLVYAATNLADGVPSRFSGSGSGTQYSLKINSLQSEDFGSYYCQHFWGTPYTFGGGTKLEIK

SEQ ID NO: 38 - protein, 243 aa, synthetic construct
QVQLQQSGAELMKPGASVKISCKATGYTFSSYWIEWVKQRPGHGLEWIGEILPGSGSTSYNEKFKDKATFTADTSSNTAFMQLSSLTSEDSAVYYCARRAYGYDEGFDYWGQGTTLTVSSGGGGSGGGGSGGGGSDIKMTQSPSSMYASLGERVTITCKASQDINSYLSWFQQKPGKSPKTLIYRANRLVDGVPSRFSGSGSGQDYSLTISSLEYEDMGIYYCLQYDEFPLTFGGGTKLEIKR

SEQ ID NO: 39 - protein, 243 aa, synthetic construct
QVQLQQSGAELMKPGASVKISCKATGYTFSSYWIEWVRQAPGHGLEWIGEVLPGSGSTSYNEKFKGRATFTADTSSNTAYMQLSSLRSEDSAVYYCARRAYGYDEGFDYWGQGTTVTVSSGGGGSGGGGSGGGGSDIKMTQSPSSMYASLGERVTITCKASQDINGYLSWYQQKPGKSPQTLLYRANRLVDGVPSRFRGSGSGQDYTLTISSLEYEDMGTYYCLQYDEFPPTFGGGTKLELKR

SEQ ID NO: 40 - protein, 243 aa, synthetic construct
QVQLQQSGAELMKPGASVKISCKATGYTFSSYWIEWVRQAPGHGLEWIGEILPGSGRTSYIEKFKGRATFTADTSSNTAYMQLSSLRSEDSAVYYCARRGYGYDEGFDYWGQGTTVTVSSGGGGSGGGGSGGGGSDIKMTQSPSSMYASLGERVTITCKASQDINSYLSWYQQKPGKSPKTLIYRAKRLVDGVPSRFSGSGSGQDYTLTISSLEYEDMGTYYCLQYDEFPPTFGGGTKLELKR

SEQ ID NO: 41 - protein, 243 aa, synthetic construct
QVQLQQSGAELMKPGASVKISCKATGYTFSSYWIEWVKQRPGHGLEWIGEVLPGSGSTSYNEKFKGKATFTADTSSNTAYMQLSSLTSEDSAVYYCARRAYGYDEGFDYWGQGTTLTVSSGGGGSGGGGSGGGGSDIKMTQSPSSMYASLGERVTITCKASQDINGYLSWFQQKPGKSPQTLLYRANRLVDGVPSRFRGSGSGQDYSLTISSLEYEDMGIYYCLQYDEFPPTFGAGTKLELKR

SEQ ID NO: 42 - protein, 243 aa, synthetic construct
QVQLQQSGAELMKPGASVKISCKATGYTFSSYWIEWVKQRPGHGLEWIGEILPGSGRTSYIEKFKGKATFTADTSSNTAYMQLSSLTSEDSAVYYCARRGYGYDEGFDYWGQGTTLTVSSGGGGSGGGGSGGGGSDIKMTQSPSSMYASLGERVTITCKASQDINSYLSWFQQKPGKSPKTLIYRAKRLVDGVPSRFSGSGSGQDYSLTISSLEYEDMGIYYCLQYDEFPPTFGAGTKLELKR

SEQ ID NO: 43 - protein, 243 aa, synthetic construct
QVQLQQSGAELMKPGASVKISCKATGYTFSSYWIEWVKQRPGHGLEWIGEILPGSGSTNYNEKFKGKATFTADTSSNTAYMQLSSLTSEDSAVYYCARRAYGYDGGFDYWGQGTTLTVSSGGGGSGGGGSGGGGSDIKMTQSPSSMYASLGERVTITCKASQDINSYLSWFQQKPGKSPKTLIYRANRLVDGVPSRFSGSGSGQDYSLTISSLEYEDMGIYYCLHYDEFPPTFGAGTKLELKR

SEQ ID NO: 44 - protein, 243 aa, synthetic construct
QVQLQQSGAELMKPGASVKISCKATGYTFSSYWIEWVKQRPGHGLEWIGEILPGSDSTSYNEKFKGKTTFTADTSSNTAYMQLSSLTSEDSAVYYCARRAYGYDEGFDYWGQGTTLTVSSGGGGSGGGGSGGGGSDIKMTQSPSSMYASLGERVTITCKASQDINSYLSWFQQKPGKSPKTLIYRANRLVDGVPSRFSGSGSGQDYSLTISSLEYEDMGIYYCLQYDEFPPTFGAGTKLELKR

SEQ ID NO: 45 - protein, 243 aa, synthetic construct
QVQLQQSGAELMKPGASVKISCKATAYTFSIYWIEWVKQRPGHGLEWIGEILPGSGSTNYNEKVKGKATFTADTSSNTAYMQLSSLTSEDSAVYYCARRAYGYDGGFDYWGQGTTLTVSSGGGGSGGGGSGGGGSDIKMTQSPSSMYASLGERVTITCKASQDINSYLSWFQQKPGKSPKTLIYRANRLVDGVPSRFSGSGSGQDYSLTISSLEYEDMGIYYCLQYDEFPPTFGAGTKLELKR

SEQ ID NO: 46 - protein, 243 aa, synthetic construct
QVQLQQSGAELMKPGASVKISCKATGYTFSSYWIEWVKQRPGHGLEWIGEIFPGSGHTSFNEKFKGKATFTADTSSNTAYIQLSSLTSEDSAVYYCARRGYGYDEGFDYWGQGTTLTVSSGGGGSGGGGSGGGGSDIKMTQSPSSMYASLGERVTITCKASQDINSYLSWFQQKPGKSPKTLIYRANRLVDGVPSRFSGSGSGQDYSLTISSLEYEDMGIYYCLQYDEFPPTFGAGTKLELKR

SEQ ID NO: 47 - protein, 243 aa, synthetic construct
QVQLQQSGAELMKPGASVKMSCKATGYTFSNYWIEWVKQRPGHGLEWIGEILPGSGSTSYNEKFKGKATFTADTSSSTAYMQLSSLTSEDSAVYYCARRGYGYDEGFDYWGQGSTLTVSSGGGGSGGGGSGGGGSDIKMTQSPSSMYASLGERVTITCKASQDINSYLSWFQQKPGKSPKTLIYRANRLVDGVPSRFSGSGSGQDYSLTISSLEYEDMGIYYCLQYDEFPPTFGAGTKLELKR

SEQ ID NO: 48 - protein, 243 aa, synthetic construct
QVQLQQSGAELMKPGASVKISCKATGYTFSSYWIEWVKQRPGHGLEWIGEILPGSGSTSYNEKFKGKATFTADTSSNTAYMQLSSLTSEDSAVYYCARRGYGYDEGFDYWGQGTTLTVSSGGGGSGGGGSGGGGSDIKMTQSPSSMYASLGERVTITCKASQDINSYLSWFQQKPGKSPKTLIYRANRLVDGVPSRFSGSGSGQDYSLTISSLEYEDMGIYYCLQYDEFPPTFGAGTKLELKR

SEQ ID NO: 49 - protein, 243 aa, synthetic construct
QVQLQQSGAELMKPGASVKISCKATGYTFSSYWIEWVQQRPGHGLEWIGEILPGSGYTSYIEQFKGKATFTADTSSNTAYMQLGSLTSEDSAVYYCARRGYGYDEGFDYWGQGTTLTVSSGGGGSGGGGSGGGGSDIKMTQSPSSMYASLGERVTITCKASQDINSYLSWFHQKPGKSPKTLIYRANRLVDGVPSRFSGSGSGQDYSLTISSLEYEDMGIYYCLQYDEFPPTFGAGTKLELKR

SEQ ID NO: 50 - protein, 243 aa, synthetic construct
QVQLQQSGAELMKPGASVKISCKATGYTLSSYWIEWVKQRPGHGLEWIGEILPGSGSTSYNEKFKGKATFTADTSSSTAYMQLSSLTSEDSAVYYCARRGYGYDEGFDYWGQGTTLTVSSGGGGSGGGGSGGGGSDIKMTQSPSSMYASLGERVTITCKASQDINSYLSWFQQKPGKSPKTLIYRANRLVDGVPSRFSGSGSGQDYSLTISSLEYEDMGIYYCLQYDEFPPTFGAGTKLELKR

SEQ ID NO: 51 - protein, 243 aa, synthetic construct
QVQLQQSGAELMKPGASVKISCKGTGYTFSSYWIEWVKQRPGHGLEWIGEISPGSGSTNYNEKFKGKATFTADTSSNTAYMQLSSLTSEDSAVYYCARRGYGYDEGFDYWGQGTTLTVSSGGGGSGGGGSGGGGSDIKMTQSPSSMYASLGERVTITCKASQDINSYLSWFQQKPGKSPKTLIYRANRLVDGVPSRFSGSGSGQDYSLTISSLEYEDMGIYYCLQYDEFPPTFGAGTKLELKR

SEQ ID NO: 52 - protein, 243 aa, synthetic construct
QVQLQQSGAELMKPGASVKISCKATGYTFGTYWIEWVKQRPGHGLEWIGEILPGSGTPNYNEKFKGKATFTADTSSNTAYMQLSSLTSEDSAVYYCARRAYGYDAGFDYWGQGTTLTVSSGGGGSGGGGSGGGGSDIKMTQSPSSMYASLGERVTITCKASQDINSYLSWFQQKPGKSPKTLIYRANRLVDGVPSRFSGSGSGQDYSLTISSLEYEDMGFYYCLQYDEFPPTFGAGTKLELKR

SEQ ID NO: 53 - protein, 243 aa, synthetic construct
QVQLQQSGAELMKPGASVKISFKATGYTFSSYWIEWVKQRPGHGLEWIGEILPGSGSTSCNEKFKGKATFTADTSSNTAYMQLSSLTSEDSAVYYCARRGYGYDEGFDYWGQGTTLTVSSGGGGSGGGGSGGGGSDIKMTQSPSSIYASLGERVTITCKASQDINSYLNWFQQKPGKSPKTLIYRANRLVDGVPSRFSGSGSGQDYSLTISSLEYEDMGIYYCLQYDEFPPTFGVGTKLELKR

SEQ ID NO: 54 - protein, 243 aa, synthetic construct
QVQLQQSGAELMKPGASVKISCKATGYTFSSYWIEWVKQRPGHGLEWIGEILPGSGRTSYIEKFKGKATFTADTSSNTAYMQLSSLTSEDSAVYYCARRGYGYDEGFDYWGQGTTLTVSSGGGGSGGGGSGGGGSDIKMTQSPSSMYASLGERVTITCKASQDINSYLSWFQQKPGKSPKTLIYRANRLVDGVPSRFSGSGSGQDYSLTISSLEYEDMGIYYCLQYDEFPPTFGAGTKLELKR

SEQ ID NO: 55 - protein, 243 aa, synthetic construct
QVQLQQSGAELMKPGASVKMSCKATGYTFSNYWIEWVKQRPGHCLEWIGEILPGSGSTSYNEKFKGKATFTADTSSSTAYMQLSSLTSEDSAVYYCARRGYGYDEGFDYWGQGSTLTVSSGGGGSGGGGSGGGGSDIKMTQSPSSMYASLGERVTITCKASQDINSYLSWFQQKPGKSPKTLIYRANRLVDGVPSRFSGSGSGQDYSLTISSLEYEDMGIYYCLQYDEFPPTFGCGTKLELKR

SEQ ID NO: 56 - protein, 243 aa, synthetic construct
QVQLQQSGAELMKPGASVKISCKATGYTFSSYWIEWVKQRPGHCLEWIGEILPGSGSTSYNEKFKGKATFTADTSSNTAYMQLSSLTSEDSAVYYCARRGYGYDEGFDYWGQGTTLTVSSGGGGSGGGGSGGGGSDIKMTQSPSSMYASLGERVTITCKASQDINSYLSWFQQKPGKSPKTLIYRANRLVDGVPSRFSGSGSGQDYSLTISSLEYEDMGIYYCLQYDEFPPTFGCGTKLELKR

SEQ ID NO: 57 - protein, 231 aa, synthetic construct
LVKTGASVKISCKASGYSFTGYYMHWVKQSHGKSLEWIGYISSYNGVTGYNQKFKGKATFTVDTSSSTAYMQFNSLTSEDSAVYYCARGRYGDYFDYWGQGTTLTVSSGGGGSGGGGSGGGGSDIQMTQSPASLSVSVGETVTITCRASDNIYSNLAWYQQKQGKSPQLLVYAATNLADGVPSRFSGSGSGTQYSLKINSLQSEDFGSYYCQHFWGTPWTFGGGTKLEIKR

SEQ ID NO: 58 - protein, 231 aa, synthetic construct
LVKTGASVKISCKASGYSFTGYYMHWVKQSHGKSLEWIGYISSYNGATSYNQKFKGKATFTVDTSSSTAYMQFNSLTSEDSAVYYCARGRYGEYFDYWGQGTTLTVSSGGGGSGGGGSGGGGSDIQMTQSPASLSVSVGETVTITCRASENIYSNLAWYQQKQGKSPQLLVFAATYLADGVPSRFSGSGSGTQYSLKINSLQSEDFGNYYCQHFWGTPWTFGGGTKLEIKR

SEQ ID NO: 59 - protein, 241 aa, synthetic construct
QVQLKQSGPGLVQPSQSLSITCTVSGFSLSSYGVHWVRQSPGKALEWLGVIWRGGSTDYNAAFMSRLSITKDNSKSQVFFKMNSLQADDTAIYYCAKNLYGHYVMDYWGQGTSVTVSSGGGGSGGGGSGGGGSDIKMTQSPSSMYASLGERVTITCKASQDINSYLSWFQQKPGKSPKTLIYRANRLVDGVPSRFSGSGSGQDYSLTISSLEYEDMGIYYCLQYDEFPPTFGAGAKLELKR

SEQ ID NO: 60 - protein, 241 aa, synthetic construct
QVQLKQSGPGLVQPSQSLSITCTVSGFSVTSYGVHWVRQSPGKGLEWLGVIWRGGSTDYNAAFMSRLSITKDNSKSQVFFKMNSLQADDSAIYYCAKNLYGHYVMDYWGQGTSVTVSSGGGGSGGGGSGGGGSNIVMTQSPKSMSMSVGERVTLSCKASENVVTYVSWYQQKPEQSPKLLIYGASNRYTGVPDRFTGSGSATDFTLTISSVQAEDLADYHCGQSYSYPFTFGSGTKLEIKR

SEQ ID NO: 61 - protein, 241 aa, synthetic construct
QVQLKQSGPGPVQPSQSLSITCTVSGFSLTSYGVHWVRQSPGKGLEWLGVIWRGGSTDNNAAFMSRLSITKDNSKSQVFFKMNSLQADDTAIYYCAKNLYGHYVMDYWGQGTSVTVSSGGGGSGGGGSGGGGSNIVMTQSPKSMSMSVGERVTLSCKASENVVTYVSWYQQKPEQSPKLLIYGASNRYTGVPDRFTGSGSATDFTLTISSVQAEDLADYHCGQSYSYPFTFGSGTKLEIKR

SEQ ID NO: 62 - protein, 241 aa, synthetic construct
QVQLKQSGPGLVQPSQSLSITCTVSGFSLTRYGVHWVRQSPGKGLEWLGVIWRGGSTDHNAAFMSRLSITKDNSKSQVFFKMNSLQADDTAIYYCAKNLYGHYVMDYWGQGTSVTVSSGGGGSGGGGSGGGGSNIVMTQSPKSMSMSVGERVTLSCKASENVVTYVSWYQQKPEQSPKLLIYGASNRYTGVPDRFTGSGSATDFTLTISSVQAEDLADYHCGQSYSYPFTFGSGTKLEIKR

SEQ ID NO: 63 - protein, 241 aa, synthetic construct
QVQLKQSGPGLVQPSQSLSITCTVSGFSVTTYGVHWVRQSPGKGLEWLGVIWRGGSTDYNAAFMSRLSITKDNSKSQVFFKMNSLQADDTAIYYCAKNLYGHYVMDYWGQGTSVTVSSGGGGSGGGGSGGGGSNIVMTQSPKSMSMSVGERVTLSCKASENVVTYVSWYQQKPEQSPKLLIYGASNRYTGVPDRFTGSGSATDFTLTISSVQAEDLADYHCGQSYSYPFTFGSGTKLEIKR

SEQ ID NO: 64 - protein, 241 aa, synthetic construct
QVQLQQPGAELVKPGASVKLSCKASGYTFTSYWMHWVKQRPGQGLEWIGMIHPNSGSTNYNEKFKSKATLTVDKSSSTAYMQLSSLTSEDSAVYYCARWGDGYSFAYWGQGTLVTVSAGGGGSGGGGSGGGGSQIVLTQSPAIMSASPGEKVTMTCSASSSVSYMHWYQQKSGTSPKRWIYDTSKLASGVPARFSGSGSGTSYSLTISSMEAEDAATYYCQQWSSNPLYTFGGGTKLEIKR

SEQ ID NO: 65 - protein, 241 aa, synthetic construct
QVQLQQPGAELVKPGASVKLSCKASGYTFTSYWMHWVKQRPGQGLEWIGMIHPNSGTTNYNEKFKSKATLTVDKSSSTAYMQLSSLTSEDSAVYYCARWGDGYSFAYWGQGTLVTVSAGGGGSGGGGSGGGGSQIVLTQSPAIMSASPGEKVTMTCSASSSVSYMHWFQQKSGTSPKRWIYDTSKLASGVPARFSGSGSGTSYSLTFSSMEAEDAATYYCQQWSSNPLYTFGGGTKLEIKR

SEQ ID NO: 66 - protein, 246 aa, synthetic construct
QVQLKQSGPELVKPGASVKMSCKASGYTFTDYVINWVKQRTGQGLEWIGEIYPGSGSTYYNEKFKGKATLTADKSSNTVYMQLSSLTSEDSAVYFCARRGERGPWFAYWGQGTLVTVSAGGGGSGGGGSGGGGSDIVLTQSPASLAVSLGQRATISCKASQSVDYDGDSYMNWYQQKPGQPPKLLIYAASNLESGIPARFSGSGSGTDFTLNIHPVEEEDAATYYCQQSNEDPLTFGAGTKLELKR

SEQ ID NO: 67 - protein, 246 aa, synthetic construct
QVQLKQSGPELVKPGASVKMSCKASGYTFTDYVINWVKQRTGQGLEWIGEIYPGSGSSYYNEKFKGKATLTADKSSNTAYMQLSSLTSEDSAVYFCARRGERGPWFAYWGQGTLVTVSAGGGGSGGGGSGGGGSDIVLTQSPASLAVSLGQRATISCKASQSVDYDGDSYMNWYQQKPGQPPKLLIYAASNLESGIPARFSGSGSGTDFTLNIHPVEEEDAATYYCQQSNEDPLTFGAGTKLELKR

SEQ ID NO: 68 - protein, 246 aa, synthetic construct
QVQLKQSGPELVKPGASVKMSCKASGYTFTDYVINWVKQRTGQGLEWIGEIYPGSGSSYYNEKFRGKATLTADKSSNTAYMQLSSLTSEDSAVYFCARRGERGPWFAYWGQGTLVTVSAGGGGSGGGGSGGGGSDIVLTQSPASLAVSLGQRATISCKASQSVDYDGDSYMNWYQQKPGQPPQLLIYAASNLQSGIPARFSGSGSGTDFTLNIHPVEEEDAATYYCQQSNEDPLTFGAGTKLELKR

SEQ ID NO: 69 - protein, 246 aa, synthetic construct
QVQLKQSGPELVKPGASVKMSCKASGYTFTDYVINWVKQKTGQGLEWIGEIYPGSGSSYYNEKFKGKATLTADKSSNTAYIQLSSLTSEDSAVYFCARRGERGPWFAYWGQGTLVTVSAGGGGSGGGGSGGGGSDIVLTQSPASLAVSLGQRATISCKASQSVDYDGDSYMNWYQQKPGQPPKLLIYAASNLESGIPARFGGSGSGTDFTLNIHPVEEEDAATYYCQQSNEDPLTFGAGTKLELKR

SEQ ID NO: 70 - protein, 240 aa, synthetic construct
QVQLQQPGAELVKPGASVKLSCKASGYTFTSYWMHWVKQRPGQGLEWIGMIHPNSGSPNYNEKFKSKATLTVDKSSSTAYMQLSSLTSEDSAVYYCARPGGYGFAYWGQGTLVTVSAGGGGSGGGGSGGGGSEIQMTQSPSSMSASLGDRITITCQATQDIVKNLNWYQQKPGKPPSFLIYYATELAEGVPSRFSGSGSGSDYSLTISNLESEDFADYYCLQFYEFPLTFGAGTKLELKR

SEQ ID NO: 71 - protein, 244 aa, synthetic construct
QVQLQQSGPELVKPGASVKMSCKASGYTFTDYVISWVKQRTGQGLEWIGEIYPGSGSSYYNEKFKGKATLTADKSSNTAYMQLSSLTSEDSAVYFCARPGDLGFAYWGQGTLVTVSAGGGGSGGGGSGGGGSDIVLTQSPASLAVSLGQRATISCKASQSVDYDGDSYMNWYQQKPGQPPKLLIYAASNLESGIPARFSGSGSGTDFTLNIHPVEEEDAATYYCQQSNKDPLTFGAGTKLELKR

SEQ ID NO: 72 - protein, 244 aa, synthetic construct; identical to SEQ ID NO: 71

SEQ ID NO: 73 - protein, 244 aa, synthetic construct
QVQLQQSGPELVKPGASVKMSCKASGYTFTDYVISWVKQRTGQGLEWIGEIYPGSGSNYYNEKFKGKAIMTADKSSNTAYMQLSSLTSEDSAVYFCARPGDLGFAYWGQGTLVTVSAGGGGSGGGGSGGGGSDIVLTQSPASLAVSLGQRATISCKASQSVDYDGDSYMNWYQQKPGQPPKLLIYAASNLESGIPARFSGSGSGTDFTLNIHPVEEEDAATYYCQQSNEDPLTFGAGTKLELKR

SEQ ID NO: 74 - protein, 244 aa, synthetic construct
QVQLQQSGPELVKPGASVKMSCKASGYTFTDYVISWVKQRTGQGLEWIGEIYPGSGSSYYNEKFKGKATLTADKSSNTAYMQLSSLTSEDSAVYFCARPGDLGFAYWGQGTLVTVSAGGGGSGGGGSGGGGSDIVLTQSPASLAVSLGQRATISCKASQSVDYDGDSYMNWYQQKPGQPPKLLIYAASNLESGIPARFSGSGSGTDFTLNIHPVEEEDAATYYCQQSNKDPFTFGAGTKLELKR

SEQ ID NO: 75 - protein, 244 aa, synthetic construct
QVQLQQSGPELVKPGASVKMSCKASGYTFTDYVISWVRQAPGQGLEWIGEIYPGSGSSYYNEKFKGRATLTADKSSNTAYMQLSSLRSEDSAVYFCARPGDLGFAYWGQGTLVTVSSGGGGSGGGGSGGGGSDIVLTQSPSSLAVSLGQRATISCKASQSVDYDGDSYMNWYQQKPGQPPKLLIYAASNLESGIPARFSGSGSGTDFTLTIHPVEEEDAATYYCQQSNKDPFTFGGGTKLELKR

SEQ ID NO: 76 - protein, 244 aa, synthetic construct
QVQLQQSGPELVKPGASVKMSCKASGYTFTDYVISWVKQRTGQGLEWIGEIYPGSGSSYYNEKFKGKATLTADKSSNTAYMQLSSLTSEDSAVYFCARPGDLGFAYWGQGTLVTVSSGGGGSGGGGSGGGGSDIVLTQSPASLAVSLGQRATISCKASQSVDYDGDSYMNWYQQKPGQPPKLLIYAASNLESGIPARFSGSGSGTDFTLNIHPVEEEDAATYYCQQSNKDPFTFGAGTKLELKR

SEQ ID NO: 77 - protein, 247 aa, synthetic construct
QVQLKESGPGLVAPSQSLSITCTVSGFSLTNYGVHWVRQPPGKGLEWLGVVWAGGITNYNWALMSRLSISKDNSKSQVFLKMNSLQTDDTAMYYCARGDGYDDGYAMDYWGQGTSVTVSSGGGGSGGGGSGGGGSDIVLTQSPASLAVSLGQRATISCRASQSVSTSSYSYMHWYQQKPGQAPKLLIKYASNLESGVPARFSGSGSGTDFTLNIHPVEEEDTATYYCQHSWEIPLTFGAGAKLELKR

SEQ ID NO: 78 - protein, 247 aa, synthetic construct
QVQLKESGPGLVAPSQSLSITCTVSGFSLTSYGVHWVRQPPGKGLEWLGVLWAGGITNYNSALMSRLSIRKDNSKSQVFLKMYSLHTDDTAMYYCARGDGYDDGYAMDYWGQGTSVTVSSGGGGSGGGGSGGGGSDIVLTQSPASLAVSLGQRATISCRASQSVSTSSYSYMHWYQQKPGQPPKLLIKYASNLESGVPARFSGSGSGTDFTLNVHPVEEEDTATYYCQHSWEIPLTFGAGTKLELKR

SEQ ID NO: 79 - protein, 247 aa, synthetic construct
QVQLKESGPGLVAPSQSLSIPCTVSGFSLTSYGVHWVRQPPGKGLEWLGVIWAGGTTNYNSALMSRLSISKDNSKSQVFLKMYSLQTDDTAMYYCARGDGYDDGYAMDYWGQGTSVTVSSGGGGSGGGGSGGGGSDIVLTQSPASLAVSLGQRATISCRASQSVSTSSYSYMHWYQQKPGQPPKLLIKYASNLESGVPARFSGSGSGTDFTLNIHPVEEEDTATYYCQHSWEIPLTFGAGTKLELKR

SEQ ID NO: 80 - protein, 245 aa, synthetic construct
EVQLQQSGAELVRSGASVKLSCTASGFNIKDYYMHWVKQRPEQGLEWIGWIDPENGDTEYAPKFQGKATMTADTSSNTAYLQLSSLTSEDTAVYYCNAPLLRYSSAMDYWGQGTSVTVSSGGGGSGGGGSGGGGSQAVVTQESALTTSPGGTVILTCRSSTGAVTTSNYANWVQEKPDHLFTGLIGGTSNRAPGVPVRFSGSLIGDKAALTITGAQTEDDAMYFCALWYSTHYVFGGGTKVTVLR

SEQ ID NO: 81 - protein, 245 aa, synthetic construct
EVQLQQSGAELVRSGASVKLSCTASGFNIKDYYIHWVKQRPEQGLEWIGWIDPENGDTEYAPKFQGKATMTADTSSNTAYLQLSSLTSEDTAVYYCNAPLLRYSSSMDYWGQGTSVTVSSGGGGSGGGGSGGGGSQAVVTQESALTTSPGGTVILTCRSSTGAVTTSNYANWVQEKPDHLFTGLIGGTSNRAPGVPVRFSGSLIGDKAALTITGAQTEDDAMYFCALWYSTHYVFGGGTKVTVLR

SEQ ID NO: 82 - protein, 245 aa, synthetic construct
EVQLQQSGAELVRSGASVKLSCTASGFNIKDYYMHWVKQRPEQGLEWIGWIDPENGDTEYAPKFQGKATMTADTSSNTAYLQLSSLTSEDTAVYYCNVALLRYSSAMDYWGQGTSVTVSSGGGGSGGGGSGGGGSQAVVTQESALTTSPGGTVILTCRSSTGAVTTSNYANWVQEKPDHLFTGLIGGTSNRAPGVPVRFSGSLIGDKAALTITGAQTEDDAMYFCALWYSTHYVFGGGTKVTVLR

SEQ ID NO: 83 - protein, 246 aa, synthetic construct
QVQLQQSGPELVKPGASVKMSCKASGYTFTDYVISWVKQRTGQGLEWIGEIYPGSGSTYYNEKFKGKATLTADKSSNTAYMQLSSLTSEDSAVYFCARRGERGPWFAYWGQGTLVTVSAGGGGSGGGGSGGGGSDIVLTQSPASLAVSLGQRATISCKASQSVDYDGDSYMNWYQQKPGQPPKLLIYAASNLESGIPARFSGSGSGTDFTLNIHPVEEEDAATYYCQQSNEDPLTFGAGTKLELKR

SEQ ID NO: 84 - protein, 247 aa, synthetic construct
QVQLQQPGAELVKPGASVKLSCKASGYTFTSYWMQWVKQRPGQGLEWIGEIDPSDSYTNYNQKFKGKATLTVDTSSSTAYMQLSSLTSEDSAVYYCARAEYGYGNYPWFAYWGQGTLVTVSAGGGGSGGGGSGGGGSQAVVTQESALTTSPGGTVILTCRSSTGAVTTSNYANWVQEKPDHLFTGLIGGTSNRAPGVPVRFSGSLIGDKAALTITGAQTEDDAMYFCALWYSTHWVFGGGTKLTVLR

SEQ ID NO: 85 - protein, 247 aa, synthetic construct
QVQLQQSGPELKKPGETVKISCKASGYTFTNYGMNWVKQAPGKGLKWMGWINTYTGEPTYADDFKGRFAFSLETSASTAYLQINNLKNEDMATYFCARKYYDYEFAYWGQGTLVTVSAGGGGSGGGGSGGGGSDIVMTQSPSSLAMSVGQKVTMSCKSSQSLLNSSNQKNYLAWYQQKPGQSPKLLVYFASTRESGVPDRFIGSGSGTDFTLTISSVQAEDLADYFCQQHYSTPLTFGAGTKLELKR

SEQ ID NO: 86 - protein, 241 aa, synthetic construct
QVQLQQSGAELVRPGASVTLSCKASGYTFTDYEMHWVKQTPVHGLEWIGAIDPETGGTAYNQKFKVKAILTADKSSSTAYMELRSLTSEDSAVYYCTRLGDYDVMDYWGQGTSVTVSSGGGGSGGGGSGGGGSDIQMTQTTSSLSASLGDRVTISCRASQDISNYLNWYQQKPDGTVKLLIYYTSRLHSGVPSRFSGSGSGTDYSLTISNLEQEDIATYFCQQDNTLPRTFGGGTKLEIKR

SEQ ID NO: 87 - protein, 243 aa, synthetic construct
QVQLQQPGSVLVRPGASVKLSCKASGYTFTSSWMHWAKQRPGQGLEWIGEIHPNSGNTNYNEKFKGKATLTVDTSSSTAYVDLSSLTSEDSAVYYCAIYYDYDAYYFDYWGQGTTLTVSSGGGGSGGGGSGGGGSEIQMTQSPSSMSASLGDRITITCQATQDIVKNLNWYQQKPGKPPSFLIYYATELAEGVPSRFSGSGSGSDYSLTISNLESEDFADYYCLQFYEFPYTFGGGTKLEIKR

SEQ ID NO: 88 - protein, 244 aa, synthetic construct
QVQLQQSGPELVKPGASVKMSCKASGYTFTDYVISWVKQRTGQGLEWIGEIYPGSGSNYYNEKFKGKATLTADKSSNTAYMQLSSLTSEDSAVYFCAREEKIYFDYWGQGTTLTVSSGGGGSGGGGSGGGGSDIVLTQSPASLAVSLGQRATISCKASQSVDYDGDSYMNWYRQKPGQPPKLLIYAASNLESGIPARFSGSGSGTDFTLNIHPVEEEDAATYYCQQSNEDPWTFGGGTKLEIKR

SEQ ID NO: 89 - protein, 242 aa, synthetic construct
EVQLQQSGTVLARPGASVKMSCKTSGYTFTSYWMHWIKQRPGQGLEWIGAIYPGNSDTTYNQKFKGKAKLTAVTSASTAYMELSSLTNEDSAVYYCTSLITTAYYFDYWGQGTTLTVSSGGGGSGGGGSGGGGSEIQMTQSPSSMSASLGDRITITCQATQDIVKNLNWYQQKPGKPPSFLIYYATELAEGVPSRFSGSGSGSDYSLTISNLESEDFADYYCLQFYEFPLTFGAGTKLELKR

SEQ ID NO: 90 - protein, 242 aa, synthetic construct
QVQLQESGGGLVKPGGSLKLSCAASGFTFSSYAMSWVRQTPEKRLEWVATISSGGSYTYYPDSVKGRFTISRDNAKNTLYLQMSSLRSEDTAMYYCARHEEANWAWFAYWGQGTLVTVSAGGGGSGGGGSGGGGSQIVLTQSPAIMSASPGEKVTITCSASSSVSYMHWFQQKPGTSPKLWIYSTSNLASGVPARFSGSGSGTSYSLTISRMEAEDAATYYCQQRSSFPYTFGGGTKLEIKR

SEQ ID NO: 91 - protein, 239 aa, synthetic construct
QVQLQQSGPQLVSPGASVKISCKASGYSFTNYWMHWVKQRPGQGLEWIGMIDPSDSETRLNQQFKDKATLTVDESSSTAYMQLSSPTSEDSAVYYCAIPYYAMDYWGQGTSVTVSSGGGGSGGGGSGGGGSDIKMTQSPSSMYASLGERVTITCKASQDINSYLSWFQQKPGKSPKTLIYRANRLVDGVPSRFSGSGSGQDYSLTISSLEYEDMGIYYCLQYDEFPLTFGAGTKLELKR

SEQ ID NO: 92 - protein, 243 aa, synthetic construct
QVQLQQPGSVLVRPGASVKLSCKASGYTFTSSWMHWAKQRPGQGLEWIGEIHPNSGNTNYNEKNKGKATLTVDTSSSTAYVDLSSLTSEDSAVYYCATYYGNYVWYFDVWGAGTSVTVSSGGGGSGGGGSGGGGSDIQMTQSPSSLSASLGERVSLTCRASQDIHGYLNLFQQKPGETIKHLIYETSNLDSGVPKRFSGSRSGSDYSLIIGSLESEDFADYYCLQYASSPLTFGAGTKLELKR

SEQ ID NO: 93 - protein, 242 aa, synthetic construct
QVQLQQPGAELVKPGASVKLSCKASGYTFTSYWMHWVKQRPGQGLEWIGMIHPNSGSTNYNEKFKSKATLTVDKSSSTAYMQLSSLTSEDSAVYYCASYGSSYWYFDVWGTGTTVTVSSGGGGSGGGGSGGGGSDIVMTQSHKFMSTSVGDRVSITCKASQDVGTAVAWYQQKPGQSPKLLIYWASTRHTGVPDRFTGSGSGTDFTLTISNVQSEDLADYFCQQYSSYPFTFGSGTKLEIKR

SEQ ID NO: 94 - protein, 244 aa, synthetic construct
QVQLKQSGPGLVQPSQSLSITCTVSGFSLTSYGVHWVRQSPGKGLEWLGVIWSGGSTDYNAAFISRLSISKDNSKSQVFFKMNSLQANDTAIYYCASYYGSSRSYWYLDVWGAGTTVTVSSGGGGSGGGGSGGGGSSIVMTQTPKFLLVSAGDRVTITCKASQSVSNDVAWYQQKPGQSPKLLIYYASNRYTGVPDRFTGSGYGTDFTFTISTVQAEDLAVYFCQQDYTSLPTFGAGTKLEIKR

SEQ ID NO: 95 - protein, 243 aa, synthetic construct
QVKLVESGGDLVKPGGSLKLSCAASGFTFSSYGMSWVRQTPDKRLEWVATISSGGSYTYYPDSVKGRFTISRDNAKNTLYLQMSSLKSEDTAMYYCARQNDSSWAWFAYWGQGTLVTVSAGGGGSGGGGSGGGGSETTVTQSPASLSVATGEKVTIRCITSTDIDDDMNWYQQKPGEPPKLLISEGNTLRPGVPSRFSSSGYGTDFVFTIENTLSEDVADYYCLQSDNMPLTFGAGTKLELKR

SEQ ID NO: 96 - protein, 243 aa, synthetic construct
QVQLQQPGAELVKPGASVKLSCKASGYTFTSYWMHWVKQRPGQGLEWIGMIHPNSGSTNYNEKFKSKATLTVDKSSSTAYMQLSSLTSEDSAVYYCALPYSNYGWYFDVWGTGTTVTVSSGGGGSGGGGSGGGGSDIQMTQTTSSLSASLGDRVTISCRASQDISNYLNWYQQKPDGTVKLLIYYTSRLHSGVPSRFSGSGSGTDYSLTISNLEQEDIATYFCQQGNTLPFTFGSGTKLEIKR

SEQ ID NO: 97 - protein, 243 aa, synthetic construct
QVQLQQPGAELVRPGSSVKLSCKASGYTFTSYWMHWVKQRPIQGLEWIGNIDPSDSETHYNQKFKDKATLTVDKSSSTAYMQLSSLTSEDSAVYYCARDYYGSYWYFDVWGTGTTVTVSSGGGGSGGGGSGGGGSDIQMTQTTSSLSASLGDRVTISCSASQGISNYLNWYQQKPDGTVKLLIYYTSSLHSGVPSRFSGSGSGTDYSLTISNLEPEDIATYYCQQYSKLPYTFGGGTKLEIKR

SEQ ID NO: 98 - protein, 241 aa, synthetic construct
EVQLQQSGAELVKPGASVKLSCTASGFNIKDYYMHWVKQRTEQGLEWIGRIDPEDGETKYAPKFQGKATITADTSSNTAYLQLSSLTSEDTAVYYCAAYGNSAWFAYWGQGTLVTVSAGGGGSGGGGSGGGGSDIVMTQSPATLSVTPGDRVSLSCRASQSISDYLHWYQQKSHESPRLLIKYASQSISGIPSRFSGSGSGSDFTLSINSVEPEDVGVYYCQNGHSFPWTFGGGTKLEIKR

SEQ ID NO: 99 - protein, 239 aa, synthetic construct
QVQLQQSGPELKKPGETVKISCKASGYTFTNYGMNWVRQAPGKGLEWMGWINTNTGEPTYAEEFKGRFAFSLETSASTAYLQINNLRNEDTATYFCARWYPYFDYWGQGTTVTVSSGGGGSGGGGSGGGGSEIQMTQSPSSMSASLGDRITITCQATQDIVKNLNWYQQKPGKPPSFLIYYATELAEGVPSRFSGSGSGSDYTLTISNLESEDFATYYCLQFYEFPYTFGGGTKLEIKR

SEQ ID NO: 100 - protein, 239 aa, synthetic construct
QVQLQQSGPELKKPGETVKISCKASGYTFTNYGMNWVKQAPGKGLKWMGWINTNTGEPTYAEEFKGRFAFSLETSASTAYLQINNLKNEDTATYFCARWYPYFDYWGQGTTLTVSSGGGGSGGGGSGGGGSEIQMTQSPSSMSASLGDRITITCQATQDIVKNLNWYQQKPGKPPSFLIYYATELAEGVPSRFSGSGSGSDYSLTISNLESEDFADYYCLQFYEFPYTFGGGTKLEIKR

SEQ ID NO: 101 - protein, 244 aa, synthetic construct
QVQLQQSGAELAKPGASVKLSCKASGYTFTSYWMHWVKQRPGQGLEWIGYINPSSGYTKYNQKFKDKATLTADKSSSTAYMQLSSLTYEDSAVYYCARSDGSSGNWYFDVWGTGTTVTVSSGGGGSGGGGSGGGGSDIQMTQSPASLSASVGETVTITCRASGNIHNYLAWYQQKQGKSPQLLVYNAKTLADGVPSRFSGSGSGTQYSLKINSLQPEDFGSYYCQHFWSTPWTFGGGTKLEIKR

SEQ ID NO: 102 - protein, 243 aa, synthetic construct
QVQLKESGPGLVAPSQSLSITCTVSGFSLTSYGVHWVRQPPGKGLEWLGVIWAGGSTNYNSALMSRLSISKDNSKSQVFLKMNSLQTDDTAMYYCAREGGYTGYFDVWGAGTTVTVSSGGGGSGGGGSGGGGSQAVVTQESALTTSPGGTVILTCRSSTGAVTTSNYANWVQEKPDHLFTGLIGGTSYRAPGVPVRFSGSLIGDKAALTITGAQTEDDAMYFCALWYSTHYVFGGGTKVTVLR

SEQ ID NO: 103 - protein, 243 aa, synthetic construct
QVQLQQPGAELVRPGSSVKLSCKASGYTFTSYWMHWVKQRPIQGLEWIGNIDPSDSETHYNQKFKDKATLTVDKSSSTAYMQLSSLTSEDSAVYYCAYSNYVPYYAMDYWGQGTSVTVSSGGGGSGGGGSGGGGSDIQMTQSPSSLSASLGERVSLTCRASQEISGYLSWLQQKPDGTIKRLIYAASTLDSGVPKRFSGSRSGSDYSLTISSLESEDFADYYCLQYASYPWTFGGGTKLEIKR

SEQ ID NO: 104 - protein, 243 aa, synthetic construct
QVQLQQPGAELVKPGASVKLSCKASGYTFTSYWMHWVKQRPGQGLEWIGMIHPNSGSTNYNEKFKSKATLTVDKSSSTAYMQLSSLTSEDSAVYYCARDYGNYDYAMDYWGQGTSVTVSSGGGGSGGGGSGGGGSDIVMTQSPATLSVTPGDRVSLSCRASQSISDYLHWYQQKSHESPRLLIKYASQSISGIPSRFSGSGSGSDFTLSINSVEPEDVGVYYCQNGHSFPYTFGGGTKLEIKR

SEQ ID NO: 105 - protein, 239 aa, synthetic construct
EVQLQQSGAELVRPGALVKLSCKASGFNIKDYFMHWVKQRPEQCLEWIGWIDPETDNTIYDPKFQGKASITADTSSNTAYLQLSSLTSEDTAVYYCARSGNMGFTYWGQGTLVTVSAGGGGSGGGGSGGGGSENVLTQSPAIMSASLGEKVTMSCRASSSVNYMYWYQQKSDASPKLWIYYTSNLAPGVPARFSGSGSGNSYSLTISSMEGEDAATYYCQQFTSSPSTFGCGTKLEIKR

SEQ ID NO: 106 - protein, 243 aa, synthetic construct
EVMLVESGGGLVKPGGSLKLSCAASGFTFSSYAMSWVRQTPEKCLEWVATISSGGSYTYYPDSVKGRFTISRDNAKNTLYLQMSSLRSEDTAMYYCASQGGSSWGAMDYWGQGTSVTVSSGGGGSGGGGSGGGGSETTVTQSPASLSMAIGEKVTIRCITNTDIDDDMNWYQQKPGEPPKLLISEGNTLRPGVPSRFSSSGYGTDFVFTIENMLSEDVADYYCLQSDNLPLTFGCGTKLELKR

SEQ ID NO: 107 - protein, 250 aa, synthetic construct
QVQLKQSGPGLVQPSQSLSITCTVSGFSLTSYGVHWVRQSPGKCLEWLGVIWSGGSTDYNAAFISRLSISKDNSKSQVFFKMNSLQADDTAIYYCARKGYGYDWYFDVWGTGTTVTVSSGGGGSGGGGSGGGGSQLVLTQSSSASFSLGASAKLTCTLSSQHSTYTIEWYQQQPLKPPKYVMELKKDGSHSTGDGIPDRFSGSSSGADRYLSISNIQPEDEAIYICGVGDTIKEQFVYVFGCGTKVTVLG

SEQ ID NO: 108 - protein, 241 aa, synthetic construct
QVQLQQPGAELVMPGASVKLSCKASGYTFTSYWMHWVKQRPGQCLEWIGEIDPSDSYTNYNQKFKGKATLTVDKSSSTAYMQLSSLTSEDSAVYYCARSSYYYYAMDYWGQGTSVTVSSGGGGSGGGGSGGGGSQIVLTQSPAIMSASPGEKVTMTCSASSSVSYMHWYQQKSGTSPKRWIYDTSKLASGVPARFSGSGSGTSYSLTISSMEAEDAATYYCQQWSSNPLTFGCGTKLELKR

SEQ ID NO: 109 - protein, 241 aa, synthetic construct
QVQLQQSGAELMKPGASVKISCKATGYTFSSYWIEWVKQRPGHGLEWIGEILPGSGSTNYNEKFKGKATFTADTSSNTAYMQLSSLTSEDSAVYYCARRAYGYDGGFDYWGQGTTLTVSSGGGSGGGGSGGGGSDIKMTQSPSSMYASLGERVTITCKASQDINSYLSWFQQKPGKSPKTLIYRANRLVDGVPSRFSGSGSGQDYSLTISSLEYEDMGIYYCLHYDEFPPTFGAGTKLELK

SEQ ID NO: 110 - protein, 241 aa, synthetic construct
QVQLQQSGAELMKPGASVKISFKATGYTFSSYWIEWVKQRPGHGLEWIGEILPGSGSTNYIEKFKGKATFTADTSSNTAYMQLSSLTSEDSAVYYCARRAYGYDEGFDYWGQGTTLTVSSGGGSGGGGSGGGGSDIKMTQSPSSMYASLGERVTITCKASQDINSYLNWFQQKPGKSPKTLIYRANRLVDGVPSRFSGSGSGQDYSLTISSLEYEDMGIYYCLQYDEFPPTFGAGTKLELK

SEQ ID NO: 111 - protein, 241 aa, synthetic construct
QVQLQQSGAELMKPGASVKISCKATGYTFSSYWIEWVKQRPGHGLEWIGEILPGSDSTSYNEKFKGKTTFTADTSSNTAYMQLSSLTSEDSAVYYCARRAYGYDEGFDYWGQGTTLTVSSGGGSGGGGSGGGGSDIKMTQSPSSMYASLGERVTITCKASQDINSYLSWFQQKPGKSPKTLIYRANRLVDGVPSRFSGSGSGQDYSLTISSLEYEDMGIYYCLQYDEFPPTFGAGTKLELK

SEQ ID NO: 112 - protein, 241 aa, synthetic construct
QVQLQQSGAELMKPGASVKISCKATAYTFSIYWIEWVKQRPGHGLEWIGEILPGSGSTNYNEKVKGKATFTADTSSNTAYMQLSSLTSEDSAVYYCARRAYGYDGGFDYWGQGTTLTVSSGGGSGGGGSGGGGSDIKMTQSPSSMYASLGERVTITCKASQDINSYLSWFQQKPGKSPKTLIYRANRLVDGVPSRFSGSGSGQDYSLTISSLEYEDMGIYYCLQYDEFPPTFGAGTKLELK

SEQ ID NO: 113 - protein, 241 aa, synthetic construct
QVQLQQSGAELMKPGASVKISCKATGYTFSSYWIEWVKQRPGHGLEWIGEILPGSGSTNYNEKFKGKATFTADTSSNTAYMQLSSLTSEDSAVYYCARRGYGYDEGFDYWGQGTTLTVSSGGGSGGGGSGGGGSDIKMTQSPSSMYASLGERVTITCKASQDINSYLSWFQQKPGKSPKTLIYRANRLVDGVPSRFSGSGSGQDYSLTISSLEYEDMGIYYCPQYVESPPTFGAGTKLELK

SEQ ID NO: 114 - protein, 241 aa, synthetic construct
QVQLQQSGAELMKPGASVKISCKATGYTFSSYWIEWVKQRPGHGLEWIGEILPGSGSTNYNEKFKGKATFTADTSSNTAYMQLSSLTSEDSAVYYCARRGYGYDEGFDYWGQGTTLTVSSGGGSGGGGSGGGGSDIKMTQSPSSMYASLGERVTITCKASQDINSYLSWFQQKPGKSPKTLIYRANRLVDGVPSRFSGSGSGQDYSLTISSLEYEDMGIYYCLQYDEFPPTFGAGTKLELK

SEQ ID NO: 115 - protein, 241 aa, synthetic construct
QVQLQQSGAELMKPGASVKMSCKATGYTFSNYWIEWVKQRPGHGLEWIGEILPGSGSTSYNEKFKGKATFTADTSSSTAYMQLSSLTSEDSAVYYCARRGYGYDEGFDYWGQGSTLTVSSGGGSGGGGSGGGGSDIKMTQSPSSMYASLGERVTITCKASQDINSYLSWFQQKPGKSPKTLIYRANRLVDGVPSRFSGSGSGQDYSLTISSLEYEDMGIYYCLQYDEFPPTFGAGTKLELK

SEQ ID NO: 116 - protein, 241 aa, synthetic construct
QVQLQQSGAELMKPGASVKISCKATGYTFSSYWIEWVQQRPGHGLEWIGEILPGSGYTSYIEQFKGKATFTADTSSNTAYMQLGSLTSEDSAVYYCARRGYGYDEGFDYWGQGTTLTVSSGGGSGGGGSGGGGSDIKMTQSPSSMYASLGERVTITCKASQDINSYLSWFHQKPGKSPKTLIYRANRLVDGVPSRFSGSGSGQDYSLTISSLEYEDMGIYYCLQYDEFPPTFGAGTKLELK

SEQ ID NO: 117 - protein, 241 aa, synthetic construct
QVQLQQSGAELMKPGASVKISCKATGYTFSSYWIEWVKQRPGHGLEWIGEILPGSGSTSYNEKFKDKATFTADTSSNTAFMQLSSLTSEDSAVYYCARRAYGYDEGFDYWGQGTTLTVSSGGGSGGGGSGGGGSDIKMTQSPSSMYASLGERVTITCKASQDINSYLSWFQQKPGKSPKTLIYRANRLVDGVPSRFSGSGSGQDYSLTISSLEYEDMGIYYCLQYDEFPLTFGGGTKLEIK

SEQ ID NO: 118 - protein, 241 aa, synthetic construct
QVQLQQSGAELMKPGASVKISCKATGYTFSSYWIEWVKQRPGHGLEWIGEVLPGSGSTSYNEKFKGKATFTADTSSNTAYMQLSSLTSEDSAVYYCARRAYGYDEGFDYWGQGTTLTVSSGGGSGGGGSGGGGSDIKMTQSPSSMYASLGERVTITCKASQDINGYLSWFQQKPGKSPQTLLYRANRLVDGVPSRFRGSGSGQDYSLTISSLEYEDMGIYYCLQYDEFPPTFGAGTKLELK

SEQ ID NO: 119 - protein, 241 aa, synthetic construct
QVQLQQSGAELMKPGASVKISCKGTGYTFSSYWIEWVKQRPGHGLEWIGEISPGSGSTNYNEKFKGKATFTADTSSNTAYMQLSSLTSEDSAVYYCARRGYGYDEGFDYWGQGTTLTVSSGGGSGGGGSGGGGSDIKMTQSPSSMYASLGERVTITCKASQDINSYLSWFQQKPGKSPKTLIYRANRLVDGVPSRFSGSGSGQDYSLTISSLEYEDMGIYYCLQYDEFPPTFGAGTKLELK

SEQ ID NO: 120 - protein, 241 aa, synthetic construct
QVQLQQSGAELMKPGASVKISCKATGYTFGTYWIEWVKQRPGHGLEWIGEILPGSGTPNYNEKFKGKATFTADTSSNTAYMQLSSLTSEDSAVYYCARRAYGYDAGFDYWGQGTTLTVSSGGGSGGGGSGGGGSDIKMTQSPSSMYASLGERVTITCKASQDINSYLSWFQQKPGKSPKTLIYRANRLVDGVPSRFSGSGSGQDYSLTISSLEYEDMGFYYCLQYDEFPPTFGAGTKLELK

SEQ ID NO: 121 - protein, 241 aa, synthetic construct
QVQLQQSGAELMKPGASVKISFKATGYTFSSYWIEWVKQRPGHGLEWIGEILPGSGSTSCNEKFKGKATFTADTSSNTAYMQLSSLTSEDSAVYYCARRGYGYDEGFDYWGQGTTLTVSSGGGSGGGGSGGGGSDIKMTQSPSSIYASLGERVTITCKASQDINSYLNWFQQKPGKSPKTLIYRANRLVDGVPSRFSGSGSGQDYSLTISSLEYEDMGIYYCLQYDEFPPTFGVGTKLELK

SEQ ID NO: 122 - protein, 241 aa, synthetic construct
QVQLQQSGAELMKPGASVKISCKATGYTFSSYWIEWVKQRPGHGLEWIGEILPGSGRTSYIEKFKGKATFTADTSSNTAYMQLSSLTSEDSAVYYCARRGYGYDEGFDYWGQGTTLTVSSGGGSGGGGSGGGGSDIKMTQSPSSMYASLGERVTITCKASQDINSYLSWFQQKPGKSPKTLIYRANRLVDGVPSRFSGSGSGQDYSLTISSLEYEDMGIYYCLQYDEFPPTFGAGTKLELK

SEQ ID NO: 123 - protein, 241 aa, synthetic construct
QVQLQQSGAELMKPGASVKISCKATGYTFSSYWIEWVKQRPGHGLEWIGEILPGSGRTSYIEKFKGKATFTADTSSNTAYMQLSSLTSEDSAVYYCARRGYGYDEGFDYWGQGTTLTVSSGGGSGGGGSGGGGSDIKMTQSPSSMYASLGERVTITCKASQDINSYLSWFQQKPGKSPKTLIYRAKRLVDGVPSRFSGSGSGQDYSLTISSLEYEDMGIYYCLQYDEFPPTFGAGTKLELK

SEQ ID NO: 124 - protein, 239 aa, synthetic construct
QVQLKQSGPGLVQPSQSLSITCTVSGFSLSSYGVHWVRQSPGKALEWLGVIWRGGSTDYNAAFMSRLSITKDNSKSQVFFKMNSLQADDTAIYYCAKNLYGHYVMDYWGQGTSVTVSSGGGSGGGGSGGGGSDIKMTQSPSSMYASLGERVTITCKASQDINSYLSWFQQKPGKSPKTLIYRANRLVDGVPSRFSGSGSGQDYSLTISSLEYEDMGIYYCLQYDEFPPTFGAGAKLELK

SEQ ID NO: 125 - protein, 239 aa, synthetic construct
QVQLKQSGPGLVQPSQSLSITCTVSGFSVTSYGVHWVRQSPGKGLEWLGVIWRGGSTDYNAAFMSRLSITKDNSKSQVFFKMNSLQADDSAIYYCAKNLYGHYVMDYWGQGTSVTVSSGGGSGGGGSGGGGSNIVMTQSPKSMSMSVGERVTLSCKASENVVTYVSWYQQKPEQSPKLLIYGASNRYTGVPDRFTGSGSATDFTLTISSVQAEDLADYHCGQSYSYPFTFGSGTKLEIK

SEQ ID NO: 126 - protein, 239 aa, synthetic construct
QVQLKQSGPGPVQPSQSLSITCTVSGFSLTSYGVHWVRQSPGKGLEWLGVIWRGGSTDNNAAFMSRLSITKDNSKSQVFFKMNSLQADDTAIYYCAKNLYGHYVMDYWGQGTSVTVSSGGGSGGGGSGGGGSNIVMTQSPKSMSMSVGERVTLSCKASENVVTYVSWYQQKPEQSPKLLIYGASNRYTGVPDRFTGSGSATDFTLTISSVQAEDLADYHCGQSYSYPFTFGSGTKLEIK

SEQ ID NO: 127 - protein, 239 aa, synthetic construct
QVQLKQSGPGLVQPSQSLSITCTVSGFSLTRYGVHWVRQSPGKGLEWLGVIWRGGSTDHNAAFMSRLSITKDNSKSQVFFKMNSLQADDTAIYYCAKNLYGHYVMDYWGQGTSVTVSSGGGSGGGGSGGGGSNIVMTQSPKSMSMSVGERVTLSCKASENVVTYVSWYQQKPEQSPKLLIYGASNRYTGVPDRFTGSGSATDFTLTISSVQAEDLADYHCGQSYSYPFTFGSGTKLEIK

SEQ ID NO: 128 - protein, 239 aa, synthetic construct
QVQLKQSGPGLVQPSQSLSITCTVSGFSVTTYGVHWVRQSPGKGLEWLGVIWRGGSTDYNAAFMSRLSITKDNSKSQVFFKMNSLQADDTAIYYCAKNLYGHYVMDYWGQGTSVTVSSGGGSGGGGSGGGGSNIVMTQSPKSMSMSVGERVTLSCKASENVVTYVSWYQQKPEQSPKLLIYGASNRYTGVPDRFTGSGSATDFTLTISSVQAEDLADYHCGQSYSYPFTFGSGTKLEIK

SEQ ID NO: 129 - protein, 241 aa, synthetic construct
QVQLKQSGPGLVQPSQSLSITCTVSGFSVTSYGVHWVRQSPGKGLEWLGVIWRGGSTDYNAAFMSRLSITKDNSKSQVFFKMNSLQADDTAIYYCAKNLYGHYVMDYWGQGTSVTVSSGGGSGGGGSGGGGSNIVMTQSPKSMSMSVGERVTLSCKASENVVTYVSWYQQKPEQSPKLLIYGASNRYTGVPDRFTGSGSATDFTLTISSVQAEDLADYHCGQSYSYLIHVRFGSGTKLEIK

SEQ ID NO: 130 - protein, 241 aa, synthetic construct
QVQLKQSGPGLVQPSQSLSITCTVSGFSLTRYGVHWVRQSPGKGLEWLGVIWRGGSTDHNAAFMSRLSITKDNSKSQVFFKMNSLQADDTAIYYCAKNLYGHYVMDYWGQGTSVTVSSGGGSGGGGSGGGGSNIVMTQSPKSMSMSVGERVTLSCKASENVVTYVSWYQQKPEQSPKLLIYGASNRYTGVPDRFTGSGSATDFTLTISSVQAEDLADYHCGQSYSYLIHVRFGSGTKLEIK

SEQ ID NO: 131 - protein, 239 aa, synthetic construct
QVQLQQPGAELVKPGASVKLSCKASGYTFTSYWMHWVKQRPGQGLEWIGMIHPNSGSTNYNEKFKSKATLTVDKSSSTAYMQLSSLTSEDSAVYYCARWGDGYSFAYWGQGTLVTVSAGGGSGGGGSGGGGSQIVLTQSPAIMSASPGEKVTMTCSASSSVSYMHWYQQKSGTSPKRWIYDTSKLASGVPARFSGSGSGTSYSLTISSMEAEDAATYYCQQWSSNPLYTFGGGTKLEIK

SEQ ID NO: 132 - protein, 240 aa, synthetic construct
QVQLQQPGAELVKPGASVKLSCKASGYTFTSYWMHWVKQRPGQGLEWIGMIHPNSGSTNYNEKFKSKATLTVDKSSSTAYMQLSSLTSEDSAVYYCARWGDGYSFAYWGQGTLVTVSAGGGSGGGGSGGGGSQIVLTQSPAIMSASPGEKVTMTCSASSSVSYMHWYQQKSGTSPKRWIYDTSKLASGVPARFSGSGSGTSYSLTISSMEAEDAATYYCQQWSSNPHVHVFGGGTKLEIK

SEQ ID NO: 133 - protein, 239 aa, synthetic construct
QVQLQQPGAELVKPGASVKLSCKASGYTFTTYWMHWVKQRPGQGLEWIGMIHPNSDNTNYNEKFKSKATLTVDKSSSTAYIQLSSLTSEDSAVYYCARWGDGYSFAYWGQGTLVTVSAGGGSGGGGSGGGGSQIVLTQSPAIMSASPGEKVTMTCSASSSVSYMHWYQQKSGTSPKRWIYDTSKLASGVPARFSGSGSGTSYSLTISSMEAEDAATYYCQQWSSNPLYTFGGGTKLEIK

SEQ ID NO: 134 - protein, 239 aa, synthetic construct
QVQLQQPGAELVKPGASVKLSCKASGYTFTSYWMHWVKQRPGQGLEWIGMIHPNSGNTNYNEKFKSKATLTVDKSSSTAYMQLSSLTSEDSAVYYCARWGDGYSFAYWGQGTLVTVSAGGGSGGGGSGGGGSQIVLTQSPAIMSASPGEKVTMTCSASSSVSYMHWYQQKSGTSPKRWIYDTSKLASGVPARFSGSGSGTSYSLTISSMEAEDAATYYCQQWSSNPLYTFGGGTKLEIK

SEQ ID NO: 135 - protein, 244 aa, synthetic construct
QVQLKQSGPELVKPGASVKMSCKASGYTFTDYVINWVKQRTGQGLEWIGEIYPGSGSTYYNEKFKGKATLTADKSSNTVYMQLSSLTSEDSAVYFCARRGERGPWFAYWGQGTLVTVSAGGGSGGGGSGGGGSDIVLTQSPASLAVSLGQRATISCKASQSVDYDGDSYMNWYQQKPGQPPKLLIYAASNLESGIPARFSGSGSGTDFTLNIHPVEEEDAATYYCQQSNEDPLTFGAGTKLELK

SEQ ID NO: 136 - protein, 244 aa, synthetic construct
QVQLKQSGPELVKPGASVKMSCKASGYTFTDYVINWVKQRTGQGLEWIGEIYPGSGSSYYNEKFKGKATLTADKSSNTAYMQLSSLTSEDSAVYFCARRGERGPWFAYWGQGTLVTVSAGGGSGGGGSGGGGSDIVLTQSPASLAVSLGQRATISCKASQSVDYDGDSYMNWYQQKPGQPPKLLIYAASNLESGIPARFSGSGSGTDFTLNIHPVEEEDAATYYCQQSNEDPLTFGAGTKLELK

SEQ ID NO: 137 - protein, 244 aa, synthetic construct
QVQLKQSGPELVKPGASVKMSCKASGYTFTDYVINWVKQRTGQGLEWIGEIYPGSGSSYYNEKFRGKATLTADKSSNTAYMQLSSLTSEDSAVYFCARRGERGPWFAYWGQGTLVTVSAGGGSGGGGSGGGGSDIVLTQSPASLAVSLGQRATISCKASQSVDYDGDSYMNWYQQKPGQPPQLLIYAASNLQSGIPARFSGSGSGTDFTLNIHPVEEEDAATYYCQQSNEDPLTFGAGTKLELK

SEQ ID NO: 138 - protein, 244 aa, synthetic construct
QVQLKQSGPELVKPGASVKMSCKASGYTFTDYVINWVKQKTGQGLEWIGEIYPGSGSSYYNEKFKGKATLTADKSSNTAYIQLSSLTSEDSAVYFCARRGERGPWFAYWGQGTLVTVSAGGGSGGGGSGGGGSDIVLTQSPASLAVSLGQRATISCKASQSVDYDGDSYMNWYQQKPGQPPKLLIYAASNLESGIPARFGGSGSGTDFTLNIHPVEEEDAATYYCQQSNEDPLTFGAGTKLELK

SEQ ID NO: 139 - protein, 239 aa, synthetic construct
QVQLQQPGAELVRPGASVKLSCKASGYTFTNYWMNWVKQRPGQGLEWIGMIDPSDSETHYNQMFKDKATLTVDKSSSTAYMQLSSLTSEDSAVYYCATYDGYYRFAYWGQGTLVTVSAGGGSGGGGSGGGGSDIQMTQSPSSLSASLGGKVTITCKASQDINKYIAWYQHKPGKGPRLLIHYTSTLQPGIPSRFSGSGSGRDYSFSISNLEPEDIATYYCLQYDILMYTFGGGTKLEIK

SEQ ID NO: 140 - protein, 239 aa, synthetic construct
QVQLQQPGAELVRPGASVRLSCKASGYTFTNYWMNWVKQRPGQGLEWIGMIDPSDSETHFNQMFKDKATLTVDKSSSTAYMQVSSLTSEDSAVYYCATYDIYYRFAYWGQGTLVTVSAGGGSGGGGSGGGGSDIQMTQSPSSLSASLGGKVTITCKASQDINKYIAWYQHKPGKGPRLLIHYTSTLQPGIPSRFSGSGSGRDYSFSISNLEPEDIATYYCLQYDILMYTFGGGTKLEIK

SEQ ID NO: 141 - protein, 238 aa, synthetic construct
QVQLQQPGAELVKPGASVKLSCKASGYTFTSYWMHWVKQRPGQGLEWIGMIHPNSDSTNYNEKFKSKATLTVDKSSSTAYMHLSSLTSEDSAVYYCARPGGYGFADWGQGTLVTVSAGGGSGGGGSGGGGSEIQMTQSPSSMSASLGDRITITCQATQDIVKNLNWYQQKPGKPPSFLIYYATELAEGVPSRFSGSGSGSDYSLTISNLESEDFADYYCLQFYEFPLTFGAGTKLELK

SEQ ID NO: 142 - protein, 238 aa, synthetic construct
QVQLQQPGAELVKPGASVKLSCKASGYTFTTYWMHWVKQRPGQGLEWIGMIHPNSGSTNYNEKFKSKATLTVDKSSSTAYMQLSSLTSEDSAVYYCARPGGYGFTYWGQGTLVTVSAGGGSGGGGSGGGGSEIQMTQSPSSMSASLGDRITITCQATQDIVKNLNWYQQKPGKPPSFLIYYATELAEGVPSRFSGSGSGSDYSLTISNLESEDFADYYCLQFYEFPLTFGAGTKLELK

SEQ ID NO: 143 - protein, 238 aa, synthetic construct
QVQLQQPGAELVKPGASVKLSCKASGYTFTSYWMHWVKQRPGQGLEWIGMIHPNSGSPNYNEKFKSKATLTVDKSSSTAYMQLSSLTSEDSAVYYCARPGGYGFAYWGQGTLVTVSAGGGSGGGGSGGGGSEIQMTQSPSSMSASLGDRITITCQATQDIVKNLNWYQQKPGKPPSFLIYYATELAEGVPSRFSGSGSGSDYSLTISNLESEDFADYYCLQFYEFPLTFGAGTKLELK

SEQ ID NO: 144 - protein, 234 aa, synthetic construct
QVQLQQPGAELVRPGASVKLSCKASGYTFTSYWINWVKQRPGQGLEWIGNIYPSDSYTNYNQKFKDKATLTVDKSSSTAYMQLSSPTSEDSAVYYCTRGNYIDYWGQGTTLTVSSGGGSGGGGSGGGGSENVLTQSPAIMSASLGEKVTMSCRASSSVNYMYWYQQKSDASPKLWIYYTSNLAPGVPARFSGSGSGNSYSLTISSMEGEDAATYYCQQFTSSHTFGGGTKLEIK

SEQ ID NO: 145 - protein, 234 aa, synthetic construct
QVQLQQPGAELVRPGASVKLSCKASGYTFTDYWINWVKQRPGQGLEWIGNIYPSDSYTNYNQKFKDKATLTVDKSSSTAYMQLSSPTSEDSAVYYCTRGNYIDYWGQGTTLTVSSGGGSGGGGSGGGGSENVLTQSPAIMSASLGEKVTMSCRASSSVNYMYWYQQKSDASPKLWIYYTSNLAPGVPARFSGSGSGNSYSLTISSMEGEDAATYYCQQFTSSHTFGGGTKLEIK

SEQ ID NO: 146 - protein, 242 aa, synthetic construct
QVQLQQSGPELVKPGASVKMSCKASGYTFTDYVISWVKQRTGQGLEWIGEIYPGSGSSYYNEKFKGKATLTADKSSNTAYMQLSSLTSEDSAVYFCARPGDLGFAYWGQGTLVTVSAGGGSGGGGSGGGGSDIVLTQSPASLAVSLGQRATISCKASQSVDYDGDSYMNWYQQKPGQPPKLLIYAASNLESGIPARFSGSGSGTDFTLNIHPVEEEDAATYYCQQSNKDPLTFGAGTKLELK

SEQ ID NO: 147 - protein, 242 aa, synthetic construct
QVQLQQSGPELVKPGASVKMSCKASGYTFTDYVISWVKQRTGQGLEWIGEIYPGSGSNYYNEKFKGKAIMTADKSSNTAYMQLSSLTSEDSAVYFCARPGDLGFAYWGQGTLVTVSAGGGSGGGGSGGGGSDIVLTQSPASLAVSLGQRATISCKASQSVDYDGDSYMNWYQQKPGQPPKLLIYAASNLESGIPARFSGSGSGTDFTLNIHPVEEEDAATYYCQQSNEDPLTFGAGTKLELK

SEQ ID NO: 148 - protein, 242 aa, synthetic construct
QVQLQQSGPELVKPGASVKMSCKASGYTFTDYVISWVKQRTGQGLEWIGEIYPGSGSSYYNEKFKGKATLTADKSSNTAYMQLSSLTSEDSAVYFCARPGDLGFAYWGQGTLVTVSAGGGSGGGGSGGGGSDIVLTQSPASLAVSLGQRATISCKASQSVDYDGDSYMNWYQQKPGQPPKLLIYAASNLESGIPARFSGSGSGTDFTLNIHPVEEEDAATYYCQQSNKDPFTFGAGTKLELK

SEQ ID NO: 149 - protein, 245 aa, synthetic construct
QVQLKESGPGLVAPSQSLSITCTVSGFSLTNYGVHWVRQPPGKGLEWLGVVWAGGITNYNWALMSRLSISKDNSKSQVFLKMNSLQTDDTAMYYCARGDGYDDGYAMDYWGQGTSVTVSSGGGSGGGGSGGGGSDIVLTQSPASLAVSLGQRATISCRASQSVSTSSYSYMHWYQQKPGQAPKLLIKYASNLESGVPARFSGSGSGTDFTLNIHPVEEEDTATYYCQHSWEIPLTFGAGAKLELK

SEQ ID NO: 150 - protein, 245 aa, synthetic construct
QVQLKESGPGLVAPSQSLSITCTVSGFSLTSYGVHWVRQPPGKGLEWLGVLWAGGITNYNSALMSRLSIRKDNSKSQVFLKMYSLHTDDTAMYYCARGDGYDDGYAMDYWGQGTSVTVSSGGGSGGGGSGGGGSDIVLTQSPASLAVSLGQRATISCRASQSVSTSSYSYMHWYQQKPGQPPKLLIKYASNLESGVPARFSGSGSGTDFTLNVHPVEEEDTATYYCQHSWEIPLTFGAGTKLELK

SEQ ID NO: 151 - protein, 234 aa, synthetic construct
QVQLQQSGPQLVSPGASVKISCKASGYSFTSYWMYWVKQRPGQGLEWIGMIDPSDSETRLNQKFKDRATLTVDKSSSTAYMQLSSPTSEDSAVYYCARTRNYWGQGTTLTVSSGGGSGGGGSGGGGSDIQMTQTPSSLSASLGDRVTISCRASQDISNYLNWYQQKPDGTVKLLIYSTSRLHSGVPSRFSGSGSGTDYSLTISNLEQEDIATYFCQQGNTLPWTFGGGTKLEIK

SEQ ID NO: 152 - protein, 234 aa, synthetic construct
QVQLQQSGPQLVSPGASVKISCKASGYSFTSYWMYWVKQRPGQGLEWIGMIDPSDSETRLNQKFKDKATLTVDKSSSTAYMQLSSPTSEDSAVYYCARTRNYWGQGTTLTVSSGGGSGGGGSGGGGSDIQMTQTPSSLSASLGDRVTISCRASQDISNYLNWYQQKPDGTVKLLIYSTSRLHSGVPSRFSGSGSGTDYSLTISNLEQEDIATYFCQQGNALPWTFGGGTKLEIK

SEQ ID NO: 153 - protein, 234 aa, synthetic construct
QVQLQQSGPQLVSPGASVKISCKASGYSFTSYWMYWVKQRPGQGLEWIGMIDPSDSETRLNQKFKDKATLTVDKSSSTAYMQLSSPTSEDSAVYYCARTRNYWGQGTSLTVSSGGGSGGGGSGGGGSDIQMTQTPSSLSASLGDRVTISCRASQDISNYLNWYQQKPDGTVKLLIYSTSRLHSGVPSRFSGSGSGTDYSLTISNLEQEDIATYFCQQGNTLPWTFGGGTKLEIK

SEQ ID NO: 154 - protein, 243 aa, synthetic construct
EVQLQQSGAELVRSGASVKLSCTASGFNIKDYYMHWVKQRPEQGLEWIGWIDPENGDTEYAPKFQGKATMTADTSSNTAYLQLSSLTSEDTAVYYCNAPLLRYSSAMDYWGQGTSVTVSSGGGSGGGGSGGGGSQAVVTQESALTTSPGGTVILTCRSSTGAVTTSNYANWVQEKPDHLFTGLIGGTSNRAPGVPVRFSGSLIGDKAALTITGAQTEDDAMYFCALWYSTHYVFGGGTKVTVL

SEQ ID NO: 155 - protein, 243 aa, synthetic construct
EVQLQQSGAELVRSGASVKLSCTASGFNIKDYYIHWVKQRPEQGLEWIGWIDPENGDTEYAPKFQGKATMTADTSSNTAYLQLSSLTSEDTAVYYCNAPLLRYSSSMDYWGQGTSVTVSSGGGSGGGGSGGGGSQAVVTQESALTTSPGGTVILTCRSSTGAVTTSNYANWVQEKPDHLFTGLIGGTSNRAPGVPVRFSGSLIGDKAALTITGAQTEDDAMYFCALWYSTHYVFGGGTKVTVL

SEQ ID NO: 156 - protein, 243 aa, synthetic construct
EVQLQQSGAELVRSGASVKLSCTASGFNIKDYYMHWVKQRPEQGLEWIGWIDPENGDTEYAPKFQGKATMTADTSSNTAYLQLSSLTSEDTAVYYCNVALLRYSSAMDYWGQGTSVTVSSGGGSGGGGSGGGGSQAVVTQESALTTSPGGTVILTCRSSTGAVTTSNYANWVQEKPDHLFTGLIGGTSNRAPGVPVRFSGSLIGDKAALTITGAQTEDDAMYFCALWYSTHYVFGGGTKVTVL

SEQ ID NO: 157 - protein, 243 aa, synthetic construct
QVQLQQSGAELVKPGASVKLSCKASGYTFSNYYVYWVKQRPGQGLEWIGEINPSNGDTNFNEKFKSKATLTVDKSSSTAYMQLSSLTSEDSAVYFCTSYYTHEAYYYAMDCWGQGTSVTVSSGGGSGGGGSGGGGSETTVTQSPASLSVATGEKVTIRCITSTDIDDDMNWYQQKPGEPPKLLISEGNTLRPGVPSRFSSSGYGTDFVFTIENTLSEDVADYYCLQSDNMPFTFGSGTKLEIK

SEQ ID NO: 158 - protein, 240 aa, synthetic construct
QVQLQQSGAELVRPGASVKLSCTASGFNIKDYYMHWVKQRPEQGLEWIGRIDPEDGDTEYAPKFQGKATMTADTSSNTAYLQLSSLTSEDTAVYYCTPYSIYDAMDYWGQGTSVTVSSGGGSGGGGSGGGGSQAVVTQESALTTSPGGTVILTCRSSTGAVTTSNYANWVQEKPDHLFTGLIGGTSNRAPGVPVRFSGSLIGDKAALTITGAQTEDDAMYFCALWYSTHYFGGGTKVTVL

SEQ ID NO: 159 - protein, 244 aa, synthetic construct
QVQLQQSGPELVKPGASVKMSCKASGYTFTDYVISWVKQRTGQGLEWIGEIYPGSGSTYYNEKFKGKATLTADKSSNTAYMQLSSLTSEDSAVYFCARRGERGPWFAYWGQGTLVTVSAGGGSGGGGSGGGGSDIVLTQSPASLAVSLGQRATISCKASQSVDYDGDSYMNWYQQKPGQPPKLLIYAASNLESGIPARFSGSGSGTDFTLNIHPVEEEDAATYYCQQSNEDPLTFGAGTKLELK

SEQ ID NO: 160 - protein, 251 aa, synthetic construct
QVQLQQSGAELVRPGVSVKISCKGSGYSFTDYGMHWVKQSHAKSLEWIGVISTYYGDASYNQKFKGKATMTVDKSSSTAYMELARLTSEDSAIYYCARQMDYDYTYYYAMDYWGQGTSVTVSSGGGSGGGGSGGGGSDIVMSQSPSSLAVSVGEKVTMSCKSSQSLLYSTNQKNYLAWYQQKPGQSPKLLIYWASTRESGVPDRFTGSGSGTDFTLTISSVKAEDLAVYYCQQYYSYPPWTFGGGTKLEIK

SEQ ID NO: 161 - protein, 242 aa, synthetic construct
QVQLQQSGPELVKPGASVKMSCKASGYTFTDYVISWVKQRTGQGLEWNGEIYPGSGSTYYNEKFKGKATLTADKSSNTAYMQLSSLTSEDSAVYFCARMDGPWFAYWGQGTLVTVSAGGGSGGGGSGGGGSDIVLTQSPASLAVSLGQRATISCKASQSVDYDGDSYMNWYQQKPGQPPKLLIYAASNLESGIPARFSGSGSGTDFTLNIHPVEEEDAATYYCQQSNEDPPTFGGGTKLEIK

SEQ ID NO: 162 - protein, 241 aa, synthetic construct
QVTLKVSGPGILQPSQTLGLACTFSGISLSTSGMGLSWLRQPSGKALEWLASIWNNDNYYNPSLKSRLTISKETSNNQVFLKLTSVDTADSTTYYCAWRPYYRYDSFAYWGQGTLVTVSAGGGSGGGGSGGGGSDIQMTQSPASLAASVGETVTITCRASENIYYSLAWYQQKQGKSPQLLIYNANSLEDGVPSRFSGSGSGTQYSMKINSMQPEDTATYFCKQAYDVPYTFGGGTKLEIK

SEQ ID NO: 163 - protein, 239 aa, synthetic construct
QVQLQQSGAELVRPGASVTLSCKASGYTFTDYEMHWVKQTPVHGLEWIGAIDPETGGTAYNQKFKVKAILTADKSSSTAYMELRSLTSEDSAVYYCTRLGDYDVMDYWGQGTSVTVSSGGGSGGGGSGGGGSDIQMTQTTSSLSASLGDRVTISCRASQDISNYLNWYQQKPDGTVKLLIYYTSRLHSGVPSRFSGSGSGTDYSLTISNLEQEDIATYFCQQDNTLPRTFGGGTKLEIK

SEQ ID NO: 164 - protein, 240 aa, synthetic construct
QVQLQQPGAELVMPGASVKLSCKASGYTFTSYWMHWVKQRPGQGLEWIGEIDPSDSYTNYNQKFKGKSTLTVDKSSSTAYMQLSSLTSEDSAVYYCARAGRYGSSFDYWGQGTTLTVSSGGGSGGGGSGGGGSDIQMTQTTSSLSASLGDRVTISCRASQDISNYLNWYQQKPDGTVKLLIYYTSRLHSGVPSRFSGSGSGTDYSLTISNLEQEDIATYFCQQGNTLPWTFGGGTKLEIK

SEQ ID NO: 165 - protein, 243 aa, synthetic construct
QVTLKESGPGILQPSQTLSLTCSFSGFSLSTSGMGVSWIRQPSGKGLEWLAHIYWDDDKRYNPSLKSRLTISKDTSRNQGFLKITSVDTADTATYYCAGRPDDYDGAWFPYWGQGTLVTVSAGGGSGGGGSGGGGSDIQMTQSPASLSVSVGETVTITCRASENIYSNLAWYQQKQGKSPQLLVYAATNLADGVPSRFSGSGSGTQYSLKINSLQSEDFGSYYCQHFWGTPWTFGGGTKLEIK

SEQ ID NO: 166 - protein, 242 aa, synthetic construct
QVQLQQSGPELVKPGASVKMSCKASGYTFTDYVISWVKQRTGQGLEWIGEIYPGSGSNYYNEKFKGKATLTADKSSNTAYMQLSSLTSEDSAVYFCAREEKIYFDYWGQGTTLTVSSGGGSGGGGSGGGGSDIVLTQSPASLAVSLGQRATISCKASQSVDYDGDSYMNWYRQKPGQPPKLLIYAASNLESGIPARFSGSGSGTDFTLNIHPVEEEDAATYYCQQSNEDPWTFGGGTKLEIK

SEQ ID NO: 167 - protein, 240 aa, synthetic construct
QVQLQQPGAELVKPGASVKLSCKASGYTFTSYWMHWVKQRPGQGLEWIGMIHPNSGSTNYNEKFKSKATLTVDKSSSTAYMQLSSLTSEDSAVYYCARYDGYWFDYWGQGTTLTVSSGGGSGGGGSGGGGSQAVVTQESALTTSPGETVTLTCRSSTGAVTTSNYANWVQEKPDHLFTGLIGGTNNRAPGVPARFSGSLIGDKAALTITGAQTEDEAIYFCALWYSNHWVFGGGTKLTVL

SEQ ID NO: 168 - protein, 240 aa, synthetic construct
EVQLQQSGTVLARPGASVKMSCKTSGYTFTSYWMHWIKQRPGQGLEWIGAIYPGNSDTTYNQKFKGKAKLTAVTSASTAYMELSSLTNEDSAVYYCTSLITTAYYFDYWGQGTTLTVSSGGGSGGGGSGGGGSEIQMTQSPSSMSASLGDRITITCQATQDIVKNLNWYQQKPGKPPSFLIYYATELAEGVPSRFSGSGSGSDYSLTISNLESEDFADYYCLQFYEFPLTFGAGTKLELK

SEQ ID NO: 169 - protein, 253 aa, synthetic construct
QVQLQQPGAELVKPGASVKLSCKASGYTFTSYWMHWVKQRPGQGLEWIGMIHPNSGSTNYNEKFKSKATLTVDKSSSTAYMQLSSLTSEDSAVYYCAPETGDYGSSYVWYFDVWGTGTTVTVSSGGGSGGGGSGGGGSQLVLTQSSSASFSLGASAKLTCTLSSQHSTYTIEWYQQQPLKPPKYVMELKKDGSHSTGDGIPDRFSGSSSGADRYLSISNIQPEDEAIYICGVGDTIKEQFVFVFGGGTKVTVL

SEQ ID NO: 170 - protein, 242 aa, synthetic construct
QVQLQQSGPELVKPGASVKMSCKASGYTFTDYVISWVKQRTGQGLEWIGEIYPGSGSTYYNEKFKGKATLTADKSSNTAYMQLSSLTSEDSAVYFCARGKVTRFAYWGQGTLVTVSAGGGSGGGGSGGGGSDIVLTQSPASLAVSLGQRATISCKASQSVDYDGDSYMNWYQQKPGQPPKLLIYAASNLESGIPARFSGSGSGTDFTLNIHPVEEEDAATYYCQQSNEDPPTFGGGTKLEIK

SEQ ID NO: 171 - protein, 241 aa, synthetic construct
EVQLVESGGGLVKPGGSLKLSCAASGFTFSSYAMSWVRQTPEKRLEWVATISDGGSYTYYPDNVKGRFTISRDNAKNNLYLQMSHLKSEDTAMYYCARDQDSNWEYFDYWGQGTSLTVSSGGGSGGGGSGGGGSDIQMTQSPSSLSASLGERVSLTCRASQDIGISLNWLQQEPDGTIKRLIYATSSLDSGVPKRFSGSRSGSDYSLTISSLESEDFVDYYCLQYASSPYTFGGGTKLEIK

SEQ ID NO: 172 - protein, 238 aa, synthetic construct
QIQLVQSGPELKKPGETVKISCKASGYTFTDYSMHWVRQAPGKGLKWMAWINTETGEPTYADDFKGRFAFSLETSASTAYLQINNLKNEDTATYFCARESWDRAMDYWGQGTSVTVSSGGGSGGGGSGGGGSDIQMTQSPASLSASVGETVTITCRASENIYSYLAWYQQKQGKSPQLLVYNAKNLADGVPSRFSGSGSGTQYSLKINSLQSEDFGYYCQHFWGTPYTFGGGTKLEIK

SEQ ID NO: 173 - protein, 237 aa, synthetic construct
QVQLQQSGPQLVSPGASVKISCKASGYSFTNYWMHWVKQRPGQGLEWIGMIDPSDSETRLNQQFKDKATLTVDESSSTAYMQLSSPTSEDSAVYYCAIPYYAMDYWGQGTSVTVSSGGGSGGGGSGGGGSDIKMTQSPSSMYASLGERVTITCKASQDINSYLSWFQQKPGKSPKTLIYRANRLVDGVPSRFSGSGSGQDYSLTISSLEYEDMGIYYCLQYDEFPLTFGAGTKLELK

SEQ ID NO: 174 - protein, 241 aa, synthetic construct
QVQLQQPGSVLVRPGASVKLSCKASGYTFTSSWMHWAKQRPGQGLEWIGEIHPNSGNTNYNEKNKGKATLTVDTSSSTAYVDLSSLTSEDSAVYYCATYYGNYVWYFDVWGAGTSVTVSSGGGSGGGGSGGGGSDIQMTQSPSSLSASLGERVSLTCRASQDIHGYLNLFQQKPGETIKHLIYETSNLDSGVPKRFSGSRSGSDYSLIIGSLESEDFADYYCLQYASSPLTFGAGTKLELK

SEQ ID NO: 175 - protein, 240 aa, synthetic construct
QVQLQQPGAELVKPGASVKLSCKASGYTFTSYWMHWVKQRPGQGLEWIGMIHPNSGSTNYNEKFKSKATLTVDKSSSTAYMQLSSLTSEDSAVYYCASYGSSYWYFDVWGTGTTVTVSSGGGSGGGGSGGGGSDIVMTQSHKFMSTSVGDRVSITCKASQDVGTAVAWYQQKPGQSPKLLIYWASTRHTGVPDRFTGSGSGTDFTLTISNVQSEDLADYFCQQYSSYPFTFGSGTKLEIK

SEQ ID NO: 176 - protein, 245 aa, synthetic construct
QVQLQQPGAELVKPGASVKMSCKASGYTFTSYNMHWVKQTPGQGLEWIGALYSGNGDTSYNQKFKGKATLTADKSSSTAYMQLSSLTSEDSAVYYCARDYYGSSHLWYFDVWGAGTTVTVSSGGGSGGGGSGGGGSQAVVTQESALTTSPGETVTLTCRSSTGAVTTSNYANWVQEKPDHLFTGLIGGTNNRAPGVPARFSGSLIGDKAALTITGAQTEDEAIYFCALWYSNHLVFGGGTKLTVL

SEQ ID NO: 177 - protein, 247 aa, synthetic construct
QVTLKESGPGILQPSQTLSLTCSFSGFSLSTSGMGVSWIRQPSGKGLEWLAHIYWDDDKRYNPSLKSRLTISKDTSRNQVFLKITSVDTADTATYYCARRAHYDYGWYFDVWGAGTTVTVSSGGGSGGGGSGGGGSDIVLTQSPASLAVSLGQRATISCKASQSVDYDGDSYMNWYQQKPGQPPKLLIYVASNLESGIPARFRGSGSGTDFTLNIHPVEEEDAAIYYCQQSHEDPRTFGGGTKLEIK

SEQ ID NO: 178 - protein, 238 aa, synthetic construct
QVQLQQPGAELVKPGASVKLSCKASGYTFTSYWMHWVKQRPGQGLEWIGMIHPNSGSTNYNEKFKSKATLTVDKSSSTAYMQLSSLTSEDSAVYYCAGYDYDWYFDVWGTGTTVTVSSGGGSGGGGSGGGGSENVLTQSPAIMSASPGEKVTMTCSASSSVSYMHWYQQKSSTSPKLWIYDTSKLASGVPGRFSGSGSGNSYSLTISSMEAEDVATYYCFQGSGYPLTFGAGTKLELK

SEQ ID NO: 179 - protein, 241 aa, synthetic construct
QVKLVESGGDLVKPGGSLKLSCAASGFTFSSYGMSWVRQTPDKRLEWVATISSGGSYTYYPDSVKGRFTISRDNAKNTLYLQMSSLKSEDTAMYYCARHEDSNYHYFDYWGQGTTLTVFSGGGSGGGGSGGGGSDIQMTQSPASLSVSVGETVTITCRASENIYSNLAWYQQKQGKSPQLLVYAATNLADGVPSRFSGSGSGTQYSLKINSLQSEDFGSYYCQHFWGTPYTFGGGTKLEIK

SEQ ID NO: 180 - protein, 241 aa, synthetic construct
QVKLVESGGDLVKPGGSLKLSCAASGFTFSSYGMSWVRQTPDKRLEWVATISSGGSYTYYPDSVKGRFTISRDNAKNTLYLQMSSLKSEDTAMYYCARQNDSSWAWFAYWGQGTLVTVSAGGGSGGGGSGGGGSETTVTQSPASLSVATGEKVTIRCITSTDIDDDMNWYQQKPGEPPKLLISEGNTLRPGVPSRFSSSGYGTDFVFTIENTLSEDVADYYCLQSDNMPLTFGAGTKLELK

SEQ ID NO: 181 - protein, 241 aa, synthetic construct
QVQLQQPGAELVKPGASVKLSCKASGYTFTSYWMHWVKQRPGQGLEWIGMIHPNSGSTNYNEKFKSKATLTVDKSSSTAYMQLSSLTSEDSAVYYCALPYSNYGWYFDVWGTGTTVTVSSGGGSGGGGSGGGGSDIQMTQTTSSLSASLGDRVTISCRASQDISNYLNWYQQKPDGTVKLLIYYTSRLHSGVPSRFSGSGSGTDYSLTISNLEQEDIATYFCQQGNTLPFTFGSGTKLEIK

SEQ ID NO: 182 - protein, 241 aa, synthetic construct
QVQLQQPGAELVRPGSSVKLSCKASGYTFTSYWMHWVKQRPIQGLEWIGNIDPSDSETHYNQKFKDKATLTVDKSSSTAYMQLSSLTSEDSAVYYCARDYYGSYWYFDVWGTGTTVTVSSGGGSGGGGSGGGGSDIQMTQTTSSLSASLGDRVTISCSASQGISNYLNWYQQKPDGTVKLLIYYTSSLHSGVPSRFSGSGSGTDYSLTISNLEPEDIATYYCQQYSKLPYTFGGGTKLEIK

SEQ ID NO: 183 - protein, 239 aa, synthetic construct
EVQLQQSGAELVKPGASVKLSCTASGFNIKDYYMHWVKQRTEQGLEWIGRIDPEDGETKYAPKFQGKATITADTSSNTAYLQLSSLTSEDTAVYYCAAYGNSAWFAYWGQGTLVTVSAGGGSGGGGSGGGGSDIVMTQSPATLSVTPGDRVSLSCRASQSISDYLHWYQQKSHESPRLLIKYASQSISGIPSRFSGSGSGSDFTLSINSVEPEDVGVYYCQNGHSFPWTFGGGTKLEIK

SEQ ID NO: 184 - protein, 241 aa, synthetic construct
QVQLKESGPGLVAPSQSLSITCTVSGFSLTSYGVHWVRQPPGKGLEWLGVIWAGGSTNYNSALMSRLSISKDNSKSQVFLKMNSLQTDDTAMYYCAREGGYTGYFDVWGAGTTVTVSSGGGSGGGGSGGGGSQAVVTQESALTTSPGGTVILTCRSSTGAVTTSNYANWVQEKPDHLFTGLIGGTSYRAPGVPVRFSGSLIGDKAALTITGAQTEDDAMYFCALWYSTHYVFGGGTKVTVL

SEQ ID NO: 185 - protein, 241 aa, synthetic construct
QVQLQQPGAELVRPGSSVKLSCKASGYTFTSYWMHWVKQRPIQGLEWIGNIDPSDSETHYNQKFKDKATLTVDKSSSTAYMQLSSLTSEDSAVYYCAYSNYVPYYAMDYWGQGTSVTVSSGGGSGGGGSGGGGSDIQMTQSPSSLSASLGERVSLTCRASQEISGYLSWLQQKPDGTIKRLIYAASTLDSGVPKRFSGSRSGSDYSLTISSLESEDFADYYCLQYASYPWTFGGGTKLEIK

SEQ ID NO: 186 - protein, 240 aa, synthetic construct
QVQLQQSGPELVKPGASVKMSCKASGYTFTDYVISWVKQRTGQGLEWIGEIYPGSGSAYYNEKFKGKATLTADKSSNTAYMQLSSLTSEDSAVYFCARRGFDYWGQGTTLTVSSGGGSGGGGSGGGGSDIVLTQSPASLAVSLGQRATISCKASQSVDYDGDSYMNWYQQKPGQPPKLLIYAASNLESGIPARFSGSGSGTDFTLNIHPVEEEDAATYYCQQSNEDPLPTFGAGTQRELK

SEQ ID NO: 187 - protein, 242 aa, synthetic construct
QVQLQQPGAELVKPGASVKLSCKASGYTFTSYWMHWVKQRPGQGLEWIGMIHPNSGSTNYNEKFKSKATLTVDKSSSTAYMQLSSLTSEDSAVYYCARDYYGSGYGYYFDYWGQGTTLTVSSGGGSGGGGSGGGGSQIVLTQSPAIMSASPGEKVTMTCSASSSVSYMHWYQQKSGTSPKRWIYDTSKLASGVPVRFSGSGSGTSYSLTISSMEAEDAATYYCQQWSSNPLTFGAGTKLELK

SEQ ID NO: 188 - protein, 243 aa, synthetic construct
QVQLQQPGAELVKPGASVKLSCKASGYTFTSYWMHWVKQRPGQGLEWIGMIHPNSGSTNYNEKFKSKATLTVDKSSSTAYMQLSSLTSEDSAVYYCARDYYGSSYGWYFDVWGTGTTVTVSSGGGSGGGGSGGGGSDIQMTQSPASLSASVGETVTITCRASGNIHNYLAWYQQKQGKSPQLLVYNAKTLADGVPSRFSGSGSGTQYSLKINSLQPEDFGSYYCQHFWSTPWTFGGGTKLEIK

SEQ ID NO: 189 - protein, 243 aa, synthetic construct
QVQLQQPGAELVKPGASVKLSCKASGYTFTSYWMHWVKQRPGQGLEWIGMIHPNSGSTNYNEKFKSKATLTVDKSSSTAYMQLSSLTSEDSAVYYCARDYYGSSYGWYFDVWGTGTTVTVSSGGGSGGGGSGGGGSDIQMTQSPASLSASVGETVTITCRASENIYSYLAWYQQKQGKSPQLLVYNAKTLAEGVPSRFSGSGSGTQFSLKINSLQPEDFGSYYCQHHYGTPFTFGSGTKLEIK

SEQ ID NO: 190 - protein, 241 aa, synthetic construct
QVQLQQPGAELVKPGASVKLSCKASGYTFTSYWMHWVKQRPGQGLEWIGMIHPNSGSTNYNEKFKSKATLTVDKSSSTAYMQLSSLTSEDSAVYYCASDYYGSSYGWYFDVWGTGTTVTVSSGGGSGGGGSGGGGSENVLTQSPAIMSASLGEKVTMSCRASSSVNYMYWSQQKSDASPKLWIYYTSNLAPGVPPRFSGSGSGNSYSLTISSMEGEDAATYYCQQFTSSLTFGAGTKLELK

SEQ ID NO: 191 - protein, 245 aa, synthetic construct
QVQLQQPGAELVKPGASVKLSCKASGYTFTSYWMHWVKQRPGQGLEWIGMIHPNSGSTNYNEKFKSKATLTVDKSSSTAYMQLSSLTSEDSAVYYCARDYYGSSYGWYFDVWGTGTTVTVSSGGGSGGGGSGGGGSQAVVTQESALTTSPGETVTLTCRSSTGAVTTSNYANWVQEKPDHLFTGLIGSTNNRAPGVPARFSGSLIGDKSALTITGAQTEDEAIYFCTLWYSNHWVFGGGTKLTVL

SEQ ID NO: 192 - protein, 243 aa, synthetic construct
QVQLQQPGAELVKPGASVKLSCKASGYTFTSYWMHWVKQRPGQGLEWIGMIHPNSGSTNYNEKFKSKATLTVDKSSSTAYMQLSSLTSEDSAVYYCTRDYYGSGYGWYFDVWGTGTTVTVSSGGGSGGGGSGGGGSDIVMTQSHKFMSTSVGDRVSITCKASQDVGTAVAWYQQKPGQSPKLLIYWASTRHTGVPDRFTGSGSGTDFTLTISNVQSEDLADYFCQQYSSYPFTFGSGTKLEIK

SEQ ID NO: 193 - protein, 239 aa, synthetic construct
QVQLQQPGAELVRPGASVKLSCKASGYTFTNYWMNWVKQRPGQGLEWIGMIDPSDSETHYNQMFKDKATLTVDKSSSTAYMQLSSLTSEDSAVYYCATYDGYYRFAYWGQGTLVTVSAGGGSGGGGSGGGGSDIKMTQSPSSMYASLGERVTITCKASQDINSYLSWFQQKPGKSPKTLIYRANRLVDGVPSRFSGSGSGQDYSLTISSLEYEDMGIYYCLQYDEFPPTFGAGTKLELK

SEQ ID NO: 194 - protein, 239 aa, synthetic construct
QVQLQQPGAELVRPGASVKLSCKASGYTFTNYWMNWVKQRPGQGLEWIGMIDPSDSETHFNQMFKDKATLTVDKSSSTAYMQLSSLTSEDSAVYYCATYDVYYRFAYWGQGTLVTVSAGGGSGGGGSGGGGSDIQMTQSPASLSVSVGETVTITCRASENIYSNLAWYQQKQGKSPQLLVYAATNLADGVPSRFSGSGSGTQYSLKINSLQSEDFGSYYCQHFWGTPFTFGSGTKLEIK

SEQ ID NO: 195 - protein, 241 aa, synthetic construct
QVQLQQPGAELVKPGASVKLSCKASGYTFTSYWMHWVKQRPGQGLEWIGMIHPNSGSTNYNEKFKSKATLTVDKSSSTAYMQLSSLTSEDSAVYYCARDYGNYDYAMDYWGQGTSVTVSSGGGSGGGGSGGGGSDIVMTQSPATLSVTPGDRVSLSCRASQSISDYLHWYQQKSHESPRLLIKYASQSISGIPSRFSGSGSGSDFTLSINSVEPEDVGVYYCQNGHSFPYTFGGGTKLEIK

SEQ ID NO: 196 - protein, 243 aa, synthetic construct
QVQLQQPGAELVKPGASVKLSCKASGYTFTSYWMHWVKQRPGQGLEWIGMIHPNSGSTNYNEKFKSKATLTVDKSSSTAYMQLSSLTSEDSAVYYCARDYGNYDYAMDYWGQGTSVTVSSGGGSGGGGSGGGGSQAVVTQESALTTSPGETVTLTCRSSTGAVTTSNYANWVQEKPDHLFTGLIGGTNNRAPGVPARFSGSLIGDKAALTITGAQTEDEAIYFCALWYSNHWVFGGGTKLTVL

SEQ ID NO: 197 - protein, 241 aa, synthetic construct
EVKLVESGGDLVKPGGSLKLSCAASGFTFSSYGMSWVRQTPDKRLEWVATISSGGSYTYYPDSVKGRFTISRDNAKNTLYLQMSSLKSEDTAMYYCASQLTGTWYYFDYWGQGTTLTVSSGGGSGGGGSGGGGSEIFVTQSPASLSMAIGEKVTIRCITSTDIDDDMNWYQQKPGEPPKLLISEGNTLRPGVPSRFSSSGYGTDFVFTIENMLSEDVADYYCLQSDNLPLTFGAGTKLELK

SEQ ID NO: 198 - protein, 240 aa, synthetic construct
QVKLVESGGDLVKPGGSLKLSCAASGFTFSSYGMSWVRQTPDKRLEWVATISSGGSYTYYPDSVKGRFTISRDNAKNTLYLQMSSLKSEDTAMYYCASQLTGTWYYFDYWGQGTTLTVSSGGGSGGGGSGGGGSQIVLTQSPAIMSASPGEKVTITCSASSSVSYMHWFQQKPGTSPKLWIYSTSNLASGVPARFSGSGSGTSYSLTISRMEAEDAATYYCQQRSSYPPTFGSGTKLELK

SEQ ID NO: 199 - protein, 240 aa, synthetic construct
QVKLVESGGDLVKPGGSLKLSCAASGFTFSSYGMSWVRQTPDKRLEWVATISSGGSYTYYPDSVKGRFTISRDNAKNTLYLQMSSLKSEDTAMYYCASQLTGTWYYFDYWGQGTTLTVSSGGGSGGGGSGGGGSQIVLTQSPAIMSASPGEKVTMTCSASSSVSYMHWYQQKSGTSPKRWIYDTSKLASGVPARFSGSGSGTSYSLTISSMEAEDAATYYCQQWSSNPLTFGSGTKLEIK

SEQ ID NO: 200 - protein, 243 aa, synthetic construct
DVKLVESGGGLVKLGGSLKLSCAASGFTFSNYYMSWVRQTPEKRLELVAVINSNGGSTYYPDTVKGRFTISRDNAKNTLYLQMSSLKSEDTALYYCARQEGIGYAMDYWGQGTSVTVSSGGGGSGGGGSGGGGSQIVLTQSPAIMSASPGEKVTLTCSASSSVSSSYLYWYQQKPGSSPKLWIYSTSNLASGVPARFSGSGSGTSYSLTISSMEAEDAASYFCHQWSSYPPTFGAGTKLELKR

SEQ ID NO: 201 - protein, 247 aa, synthetic construct
EVQLQQSGPELVKPGASVKISCKTSGYTFTEYTMHWVKQSHGKSLEWIGGIYPNNGGTSYNQKFKGKATLTVDKSSSTAYMELRSLTSEDSAVYYCARGGWLLGYWGQGTTLTVSSGGGGSGGGGSGGGGSQLVLTQSSSASFSLGASAKLTCTLSSQHSTYTIEWYQQQPLKPPKYVMELKKDGSHSTGDGIPDRFSGSSSGADRYLSISNIQPEDEAIYICGVGDTIKEQFVYVFGGGTKVTVLR

SEQ ID NO: 202 - protein, 246 aa, synthetic construct
QVQLKQSGPGLVQPSQSLSITCTVSGFSLTSYGVHWVRQSPGKGLEWLGVIWSGGSTDYNAAFISRLSISKDNSKSQVFFKMNSLQADDTAIYYCARDGGIRGAMDYWGQGTSVTVSSGGGGSGGGGSGGGGSDVLMTQTPLSLPVSLGDQASISCRSSQSIVHSNGNTYLEWYLQKPGQSPKLLIYKVSNRFSGVPDRFSGSGSGTDFTLKISRVEAEDLGVYYCFQGSHVPWTFGGGTKLEIKR

SEQ ID NO: 203 - protein, 243 aa, synthetic construct
QVQLQQSGAELMKPGASVKISCKATGYTFSSYWIEWVKQRPGHGLEWIGEILPGSGSTNYNEKFKGKATFTADTSSNTAYMQLSSLTSEDSAVYYCARRGYGYDEGFDYWGQGTTLTVSSGGGGSGGGGSGGGGSDIKMTQSPSSMYASLGERVTITCKASQDINSYLSWFQQKPGKSPKTLIYRANRLVDGVPSRFSGSGSGQDYSLTISSLEYEDMGIYYCLQYDEFPPTFGAGTKLELKR

SEQ ID NO: 204 - protein, 245 aa, synthetic construct
QVQLQQSGAELVRPGASVTLSCKASGYTFTDYEMHWVKQTPVHGLEWIGAIDPETGGTAYNQKFKGKATLTADKSSSTAYMELRSLTSEDSAVYYCTRNYDYAMDYWGQGTSVTVSSGGGGSGGGGSGGGGSDVVMTQTPLTLSVTIGQPASISCKSSQSLLDSDGKTYLNWLLQRPGQSPKRLIYLVSKLDSGVPDRFTGSGSGTDFTLKISRVEAEDLGVYYCWQGTHFPWTFGGGTKLEIKR

SEQ ID NO: 205 - protein, 243 aa, synthetic construct
DVKLVESGGGLVKLGGSLKLSCAASGFTFSSYYMSWVRQTPEKRLELVAVINSNGGSTFYPDTVKGRFTISRDNAKNTLYLQMSSLKSEDTALYYCARQEGIGYALDYWGQGTSVTVSSGGGGSGGGGSGGGGSQIVLTQSPAIMSASPGEKVTLPCSASSSVSSSYLYWYQQKPGSSPKLWIYSTSNLASGVPARFSGSGSGTSYSLTISSMEAEDAASYFCHQWSSYPPTFGAGTKLELKR

SEQ ID NO: 206 - protein, 250 aa, synthetic construct
EVKLVESGGDLVKPGGSLKLSCAASGFTFSSYAMSWVRQTPEKRLEWVAAISSGGSTYYPDSVKGRFTISRDNARNILYLQMSSLRSEDTAMYYCAREREWGVYYGSSLDYWGQGTTLTVSSGGGGSGGGGSGGGGSDVLMTQTPLSLPVSLGDQASISCRSSQSIVYSNGNTYLEWYLQKPGQSPKLLIYKVSNRFSGVPDRFSGSGSGTDFTLKISRVEAEDLGVYYCFQGSHVPPTFGGGTKLEIKR

SEQ ID NO: 207 - protein, 238 aa, synthetic construct
EVQLQQSGAELVKPGASVKLSCTASGFNIKDTYMHWVKQRPEQGLEWIGRIDPANGNTKYDPKFQGKATITADTSSNTAYLQLSSLTSEDTAVYYCARSDGNYDWGQGTLVTVSAGGGGSGGGGSGGGGSDIQMTQSPASLSVSVGETVTITCRASENIYNNLAWYQQKQGKSPQLLVYAATNLADGVPSRFSGSGSGTQYSLKINSLQSEDFGSYYCQHFWGTPWTFGGGTKLEIKR

SEQ ID NO: 208 - protein, 243 aa, synthetic construct
DVKLVESGGGLVKLGGSLKLSCAASGFTFSNYYMSWVRQTPEKRLELVAVINSNGGSTYYPDTVKGRFTISRDNAKNILYLQMSSLKSEDTALYYCARQEGIGYGMDYWGQGTSVTVSSGGGGSGGGGSGGGGSQIVLTQSPAIMSASPGEKVTLTCSASSSVSSSYLYWYQQKPGSSPKLWIYSTSNLASGVPARFSGSGSGTSYSLTISSMEAEDAASYFCHQWSSYPPTFGAGTKLELKR

SEQ ID NO: 209 - protein, 243 aa, synthetic construct
EVQLVESGGGLVQPKGSLKLSCAASGFTFNTYVMNWVRQAPGKGLEWVARIRSKSDNYATYYADSVKDIFTISRDDSQSMLYLQMNNLKTEDTAMYYCVRHDGVVGFDVWGAGTTVTVSSGGGGSGGGGSGGGGSQIVLTQSPAIMSASPGEKVTMTCSASSSVSYMYWYQQKPGSSPRLLIYDTSNLASGVPVRFSGSGSGTSYSLTISRMEAEDAATYYCQQWSTYPPITFGAGTKLELKR

SEQ ID NO: 210 - protein, 236 aa, synthetic construct
DVQLQESGPGLVKPSQSLSLTCSVTGYSITSGYYWNWIRQFPGNKLEWMGYISYDGSNNYNPSLKNRISITRDTSKNQFFLKLNSVTTEDTATYYCARGGGRGWGQGTLVTVSAGGGGSGGGGSGGGGSQIVLTQSPAIMSASPGEKVTMTCSASSSVSYMYWYQQKPGSSPRLLIYDTSNLASGVPVRFSGSGSGTSYSLTISRMEAEDAATYYCQQWSSYPFTFGSGTKLEIKR

SEQ ID NO: 211 - protein, 242 aa, synthetic construct
QIQLVQSGPELKKPGETVKISCKASGYTFTDYSMHWVKQAPGKGLKWMGWINTETGEPTYADDFKGRFAFSLETSASTAYLQINNLKNEDTATYFCARDYYDYYYAMDYWGQGTSVTVSSGGGGSGGGGSGGGGSQIVLSQSPAILSASPGEKVTMTCRASSSVSYMHWYQQKPGSSPKPWIYATSNLASGVPARFSGSGSGTSYSLTISRVEAEDAATYYCQQWSSNPYTFGGGTKLEIKR

SEQ ID NO: 212 - protein, 241 aa, synthetic construct
QIQLVQSGPELKKPGETVKISCKASGYTFTDYSMHWVKQAPGKGLKWMGWINTETGEPTYADDFKGRFAFSLETSASTAYLQINNLKNEDTATYFCARESWDRAMDYWGQGTSVTVSSGGGGSGGGGSGGGGSDIQMTQSPASLSVSVGETVTITCRASENIYSNLAWYQQKQGKSPQLLVYAATNLADGVPSRFSGSGSGTQYSLKINSLQSEDFGSYYCQHFWGTPWTFGGGTKLEIKR

SEQ ID NO: 213 - protein, 244 aa, synthetic construct
QVQLQQPGAELVRPGASVKLSCKASGYTFTNYWMNWVKQRPEQGLEWIGRIDPYDSETHYNQKFKDKAILTVDKSSSTAYMQLSSLTSEDSAVYYCARIYSDYDGAWFAYWGQGTLVTVSAGGGGSGGGGSGGGGSDIVMTQSHKFMSTSVGDRVSITCKASQDVSTAVAWYQQKPGQSPKLLIYWASTRHTGVPDRFTGSGSGTDYTLTISSVQAEDLALYYCQQHYSTPWTFGGGTKLEIKR

SEQ ID NO: 214 - protein, 244 aa, synthetic construct
EVQLQQSGPELVKPGASVKMSCKASGYTFTDYYMDWVKQSHGESFEWIGRVNPYNGGTSYNQKFKGKATLTVDKSSSTAYMELNSLTSEDSAVYYCARGTVGFAYWGQGTLVTVSAGGGGSGGGGSGGGGSDVVMTQTPLTLSVTIGQPASISCKSSQSLLDSDGKTYLNWLLQRPGQSPKRLIYLVSKLDSGVPDRFTGSGSGTDFTLKISRVEAEDLGVYYCWQGTHFPWTFGGGTKLEIKR

SEQ ID NO: 215 - protein, 250 aa, synthetic construct
EVKLVESGGGLVKPGGSLKLSCAASGFTFSSYAMSWVRQTPEKRLEWVASISSGGSTYYPDSVKGRFTISRDNARNILSLQMSSLRSEDTAMYYCAREREWGVFYGSSLDYWGQGTTLTVSSGGGGSGGGGSGGGGSDVLMTQTPLSLPVSLGDQASISCRSSQSIVHSNGNTYLEWYLQKPGQSPKFLIYKVSNRFSGVPDRFSGSGSGTDFTLKISRVEAEDLGVYYCFQGSHVPPTFGGGTKLEIKR

SEQ ID NO: 216 - protein, 243 aa, synthetic construct
EVMLVESGGGLVKPGGSLKLSCAASGFTFSSYAMSWIRQTPEKRLEWVATISSGGSYTYYPDSVKGRFTISRDNAKNTLYLQMSSLRSEDTAMYYCARHDDSSYGYFDYWGQGTTLTVSSGGGGSGGGGSGGGGSETTVTQSPASLSVATGEKVTIRCITSTDIDDDMNWYQQKPGEPPKLLISEGNTLRPGVPSRFSSSGYGTDFVFTIENTLSEDVADYYCLQSDNMPLTFGGGTKLEIKR

SEQ ID NO: 217 - protein, 237 aa, synthetic construct
EVKLVESGGGLVKPGGSLKLSCAASGFTFSNYAMSWVRQTPEKRLEWVASISSGGTTYYPDSVKGRFTISRDNARNILYLQMSSLRSEDTAMYYCARTMPDVWGAGTTVTVSSGGGGSGGGGSGGGGSDIQMTQSPSSLSASLGGKVTITCKASQDINKYIAWYQHKPGKGPRLLIHYTSTLQPGIPSRFSGSGSGRDYSFSISNLEPEDIATYYCLQYDNLYMYTFGGGTKLEIKR

SEQ ID NO: 218 - protein, 242 aa, synthetic construct
QVQLKESGPGLVAPSQSLSITCTVSGFSLTSYGVHWVRQPPGKGLEWLGVIWAGGSTNYNSALMSRLSISKDNSKSQVFLKMNSLQTDDTAMYYCARDTDGYYWAMDYWGQGTSVTVSSGGGGSGGGGSGGGGSDIQMNQSPSSLSASLGDTITITCHASQNINVWLSWYQQKPGNIPKLLIYKASNLHTGVPSRFSGSGSGTGFTLTISSLQPEDIATYYCQQGQSYPYTFGGGTKLEIKR

SEQ ID NO: 219 - protein, 236 aa, synthetic construct
DVQLQESGPGLVKPSQSLSLTCTVTGYSITSDHAWNWIRQFPGNKLEWMGYISYSGSTTYNPSLKSRISITRDTSKNQFFLQLNSVTTEDTATYYCARKWGDYWGQGTSVTVSSGGGGSGGGGSGGGGSQIVLTQSPALMSASPGEKVTMTCSASSSVSYMYWYQQKPRSSPKPWIYLTSNLASGVPARFSGSGSGTSYSLTISSMEAEDAATYYCQQWSSNPPTFGGGTKLEIKR

SEQ ID NO: 220 - protein, 245 aa, synthetic construct
QVQLQQSGAELVRPGASVTLSCKASGYTFTDYEMHWVKQTPVHGLEWIGAIDPETGGTAYNQKFKGKATLTADKSSSTAYMELRSLTSEDSAVYYCTRNYDYALDYWGQGTSVTVSSGGGGSGGGGSGGGGSDVVMTQTPLTLSVTIGQPASISCKSSQSLLDSDGKTYLNWLLQRPGQSPKRLIYLVSKLDSGVPDRFTGSGSGTDFTLKISRVEAEDLGFYYCWQGTHFPWTFGGGTKLEIKR

SEQ ID NO: 221 - protein, 236 aa, synthetic construct
DVQLQESGPGLVKPSQSLSLTCSVTGYSITSGYYWNWIRQFPGNKLEWMGYISYDGSNDYNPSLKNRISITRDTSKNQFFLKLNSVTTEDTATYYCARGGGRGWGQGTLVTVSAGGGGSGGGGSGGGGSQIVLTQSPAIMSASPGEKVTMTCSASLSVSDMYWYQQKPGSSPRLLIYDTSNLASGVPVRFSGSGSGTSYSLTISRMEAEDAATYYCQQWSSYPFTFGSGTKLEIKR

SEQ ID NO: 222 - protein, 243 aa, synthetic construct
DVKLVESGGGLVKLGGSLKLSCAASGFTFSNYYMSWVRQTPEKRLELVAVINSNGGSTYYPDTVKGRFTISRDNAKNTLYLQMSSLKSEDTALYYCARQEEIGYAMDYWGQGTSVTVSSGGGGSGGGGSGGGGSQIVLTQSPAIMSASPGEKVTLTCSASSSVSSSYLYWYQQRPGSSPKLWIYSTSNLASGVPARFSGSGSGTSYSLTISSMEAEDAASYFCHQWSSYPPTFGAGTKLELKR

SEQ ID NO: 223 - protein, 239 aa, synthetic construct
EVQLQQSGAELVRPGALVKLSCKASGFNIKDYFMHWVKQRPEQGLEWIGWIDPETDNTIYDPKFQGKASITADTSSNTAYLQLSSLTSEDTAVYYCARSGNMGFTYWGQGTLVTVSAGGGGSGGGGSGGGGSENVLTQSPAIMSASLGEKVTMSCRASSSVNYMYWYQQKSDASPKLWIYYTSNLAPGVPARFSGSGSGNSYSLTISSMEGEDAATYYCQQFTSSPSTFGGGTKLEIKR

SEQ ID NO: 224 - protein, 243 aa, synthetic construct
EVMLVESGGGLVKPGGSLKLSCAASGFTFSSYAMSWVRQTPEKRLEWVATISSGGSYTYYPDSVKGRFTISRDNAKNTLYLQMSSLRSEDTAMYYCASQGGSSWGAMDYWGQGTSVTVSSGGGGSGGGGSGGGGSETTVTQSPASLSMAIGEKVTIRCITNTDIDDDMNWYQQKPGEPPKLLISEGNTLRPGVPSRFSSSGYGTDFVFTIENMLSEDVADYYCLQSDNLPLTFGAGTKLELKR

SEQ ID NO: 225 - protein, 245 aa, synthetic construct
EVMLVESGGGLVKPGGSLKLSCAASGFTFSSYAMSWVRQTPEKRLEWVATISNGGSYTYYPDSVKGRFTISRDNAKNTLYLQMSSLRSEDTAMYYCARHEITTRFAYWGQGTLVTVSAGGGGSGGGGSGGGGSDIVLTQSPASLAVSLGQRATISCKASQSVDYDGDSYMNWYQQKPGQPPKLLIYAASNLESGIPARFSGSGSGTDFTLNIHPVEEEDAATYYCQQSNEDPWTFGGGTKLEIKR

SEQ ID NO: 226 - protein, 238 aa, synthetic construct
VQLQESGPGLVKPSQSLSLTCSVTGYSITSGYYWNWIRQFPGNKLEWMGYMSYDGSNNYNPSLKNRISITRDTSKNQFFLKLNSVTTEDTATYYCAREAGYFDYWGQGTTLTVSSGGGGSGGGGSGGGGSDIVLTQSPATLSVTPGDSVSLSCRASQSISNNLHWYQQKSHESPRLLIKYASQSISGIPSRFSGSGSGTDFTLSINSVETEDFGMYFCQQSNSWPFTFGSGTKLEIKR

SEQ ID NO: 227 - protein, 243 aa, synthetic construct
EVQLVESGGGLVQPKGSLKLSCAASGFSFNTYAMNWVRQAPGKGLEWVARIRSKSNNYATYYADSVKDRFTISRDDSESMLYLQMNNLKTEDTAMYYCVRQYGYDFDYWGQGTTLTVSSGGGGSGGGGSGGGGSQIVLTQSPAIMSASPGEKVTLTCSASSSVSSSYLYWYQQKPGSSPKLWIYSTSNLASGVPARFSGSGSGTSYSLTISSMEAEDAASYFCHQWSSYPPTFGGGTKLEIKR

SEQ ID NO: 228 - protein, 243 aa, synthetic construct
EVQLVESGGDLVKPGGSLKLSCAASGFTFSSYGMSWVRQTPDKRLEWVATISSGGSYTYYPDSVKGRFTISRDNAKNTLYLQMSSLKSEDTAMYYCARHKGVNWDYFDYWGQGTTLTVSSGGGGSGGGGSGGGGSETTVTQSPASLSVATGEKVTIRCITSTDIDDDMNWYQQKPGEPPKLLISEGNTLRPGVPSRFSSSGYGTDFVFTIENTLSEDVADYYCLQSDNMPLTFGAGTKLELKR

SEQ ID NO: 229 - protein, 249 aa, synthetic construct
QVQLQQSGAELVRPGASVTLSCKASGYTFTDYEMHWVKQTPVHGLEWIGAIDPETGGTAYNQKFKGKATLTADKSSSTAYMELRSLTSEDSAVYYCTRGDGNYDSWYFDVWGAGTTVTVSSGGGGSGGGGSGGGGSDVVMTQTPLTLSVTIGQPASISCKSSQSLLDSDGKTYLHWLLQRPGQSPKRLIYLVSKLDSGVPDRFTGSGSGTDFTLKISRVEAEDLAVYYCWQGTHFPWTFGGGTKLEIKR

SEQ ID NO: 230 - protein, 241 aa, synthetic construct
EVMLVESGGGLVKPGGSLKLSCAASGFTFSSYAMSWVRQTPEKRLEWVATISSGGSYTYYPDSVKGRFTISRDNAKNTLYLQMSSLRSEDTAMYYCARLPVTTVVFDYWGQGTTLTVSSGGGGSGGGGSGGGGSDIQMTQSPSSLSASLGGKVTITCKASQDINKYIAWYQHKPGKGPRLLIHYTSTLQPGIPSRFSGSGSGRDYSFSISNLEPEDIATYYCLQYDNLRTFGGGTKLEIKR

SEQ ID NO: 231 - protein, 243 aa, synthetic construct
EVQLVESGGGLVKPGGSLKLSCAASGFTFSSYAMSWVRQTPEKRLEWVATISSGGSYTYYPDSVKGRFTISRDNAKNTLYLQMSSLRSEDTAMYYCARRPVVVPFDYWGQGTTLTVSSGGGGSGGGGSGGGGSQAVVTQESALTTSPGETVTLTCRSSTGAVTTSNYANWVQEKPDHLFTGLIVGTNNRAPGVPARFSGSLIGDKAALTITGAQTEDEAIYFCVLWYSNHLVFGGGTKLTVLG

SEQ ID NO: 232 - protein, 240 aa, synthetic construct
QVQLKQSGPGLVQPSQSLSITCTVSGFSLTSYGVHWVRQSPGKGLEWLGVIWSGGSTDYNAAFISRLSISKDNSKSQVFFKMNSLQADDTAIYYCARGWDADYFDYWGQGTTLTVSSGGGGSGGGGSGGGGSNIVMTQSPKSMSMSVGERVTLSCKASENVGTYVSWYQQKPEQSPKLLIYGASNRYTGVPDRFTGSGSATDFTLTISSVQAEDLADYHCGQSYSYPPTFGAGTKLELKR

SEQ ID NO: 233 - protein, 242 aa, synthetic construct
QVQLQQPGAELVKPGASVKLSCKASGYTFTNYWMHWVKQRPGQGLEWIGMIHPNSGSTNYNEKFKSKATLTVDKSSSTAYMQLSSLTSEDSAVYYCTRYDYDDYWGQGTTLTVSSGGGGSGGGGSGGGGSDIVLTQSPASLAVSLGQRATISCRASETVDSYGYSFMHWYQQKPGQPPKLLIYRASNLESGIPARFSGSGSRTDFTLTINPVEADDVATYYCQQSNEDPRTFGGGTKLEIKR

SEQ ID NO: 234 - protein, 247 aa, synthetic construct
EVQLQQSGPELVKPGASVKISCKASGYTFTDYYMNWVKQSHGKSLEWIGDINPNNGGTSYNQKFKGKATLTVDKSSSTAYMDLRSLTSEDSAVYYCARSELGLYAMDYWGQGTSVTVSSGGGGSGGGGSGGGGSDIVMSQSPSSLAVSVGEKVTMSCKSSQSLLYSTNQKNYLAWYQQKPGQSPKLLLYWASTRESGVPDRFTGSGSGTDFTLTINSVKAEDLAVYYCQQYYSYRTFGGGTKLEIKR

SEQ ID NO: 235 - protein, 245 aa, synthetic construct
QVQLQQSGAELMKPGASVKLSCKATGYTFTGYWIEWVKQRPGHGLEWIGEILPGSGSTNYNEKFKGKATFTADTSSNTAYMQLSSLTTEDSAIYYCARGRIHYFDYWGQGTTLTVSSGGGGSGGGGSGGGGSDVVMTQTPLTLSVTIGQPASISCKSSQSLLDSDGKTYLNWLLQRPGQSPKRLIYLVSKLDSGVPDRFTGSGSGTDFTLKISRVEAEDLGVYYCWQGTHFPFTFGSGTKLEIKR

SEQ ID NO: 236 - protein, 244 aa, synthetic construct
QVQLQQSGAELMKPGASVKLSCKATGYTFTGYWIEWVKQRPGHGLEWIGEILPGSGSTNYNEKFKGKATFTADTSSNTAYMQLSSLTTEDSAIYYCARGRIHYFDYWGQGTTLTVSSGGGGSGGGGSGGGGSDIVLTQSPASLAVSLGQRATISCKASQSVDYDGDSYMNWYQQKPGQPPKLLIYAASNLESGIPARFSGSGSGTDFTLNIHPVEEEDAATYYCQQSNEDPFTFGSGTKLEIKR

SEQ ID NO: 237 - protein, 250 aa, synthetic construct
QVQLKQSGPGLVQPSQSLSITCTVSGFSLTSYGVHWVRQSPGKGLEWLGVIWSGGSTDYNAAFISRLSISKDNSKSQVFFKMNSLQADDTAIYYCARKGYGYDWYFDVWGTGTTVTVSSGGGGSGGGGSGGGGSQLVLTQSSSASFSLGASAKLTCTLSSQHSTYTIEWYQQQPLKPPKYVMELKKDGSHSTGDGIPDRFSGSSSGADRYLSISNIQPEDEAIYICGVGDTIKEQFVYVFGGGTKVTVLG

SEQ ID NO: 238 - protein, 241 aa, synthetic construct
QVQLQQPGAELVMPGASVKLSCKASGYTFTSYWMHWVKQRPGQGLEWIGEIDPSDSYTNYNQKFKGKATLTVDKSSSTAYMQLSSLTSEDSAVYYCARSSYYYYAMDYWGQGTSVTVSSGGGGSGGGGSGGGGSQIVLTQSPAIMSASPGEKVTMTCSASSSVSYMHWYQQKSGTSPKRWIYDTSKLASGVPARFSGSGSGTSYSLTISSMEAEDAATYYCQQWSSNPLTFGAGTKLELKR

SEQ ID NO: 239 - protein, 237 aa, synthetic construct
DVQLQESGPGLVKPSQSLSLTCSVTGYSITSGYYWNWIRQFPGNKLEWMGYISYDGSNNYNPSLKNRISITRDTSKNQFFLKLNSVTTEDTATYYCARGGGRDWGQGTTLTVSSGGGGSGGGGSGGGGSEIQMTQSPSSMSASLGDRITITCQATQDIVKNLNWYQQKPGKPPSFLIYYATELAEGVPSRFSGSGSGSDYSLTISNLESEDFADYYCLQFYEFPLTFGAGTKLELKR

SEQ ID NO: 240 - protein, 246 aa, synthetic construct
QVQLKQSGPGLVQPSQSLSITCTVSGFSLTSYGVHWVRQSPGKGLEWLGVIWSGGSTDYNAAFISRLSISKDNSKSQVFFKMNSLQADDTAIYYCARGGDYDSYAMDYWGQGTSVTVSSGGGGSGGGGSGGGGSDIVLTQSPASLAVSLGQRATISCRASESVDNYGISFMNWFQQKPGQPPKLLIYAASNQGSGVPARFSGSGSGTDFSLNIHPMEEDDTAMYFCQQSKEVPPTFGGGTKLEIKR

SEQ ID NO: 241 - protein, 245 aa, synthetic construct
QVQLQQPGAELVKPGASVKMSCKASGYTFTSYWITWVKQRPGQGLEWIGDIYPGSGSTNYNEKFKSKATLTVDTSSSTAYMQLSSLTSEDSAVYYCARESVYDGYSWYFDVWGTGTTVTVSSGGGGSGGGGSGGGGSDIVMTQSPATLSVTPGDRVSLSCRASQSISDYLHWYQQKSHESPRLLIKYASQSISGIPSRFSGSGSGSDFTLSINSVEPEDVGVYYCQNGHSFPLTFGAGTKLELKR

SEQ ID NO: 242 - protein, 248 aa, synthetic construct
EFQLQQSGPELVKPGASVKISCKASGYSFTDYNMNWVKQSNGKSLEWIGVINPNYGTTSYNQKFKGKATLTVDQSSSTAYMQLNSLTSEDSAVYYCASTYDYDDWYFDVWGTGTTVTVSSGGGGSGGGGSGGGGSDVLMTQTPLSLPVSLGDQASISCRSSQSIVHSNGDTYLEWYLQKPGQSPKLLIYKVSNRFSGVPDRFSGSGSGTDFTLKISRVEAEDLGVYYCFQGSHVPLTFGAGTKLELKR

SEQ ID NO: 243 - protein, 241 aa, synthetic construct
QVQLQQPGAELVMPGASVKLSCKASGYTFTSYWMHWVKQRPGQGLEWIGEIDPSDSYTNYNQKFKGKATLTVDKSSSTAYMQLSSLTSEDSAVYYCARSGNYLYAMDYWGQGTSVTVSSGGGGSGGGGSGGGGSQIVLTQSPAIMSASPGEKVTMTCSASSSVSYMHWYQQKSGTSPKRWIYDTSKLASGVPARFSGSGSGTSYSLTISSMEAEDAATYYCQQWSSNPLTFGAGTKLELKR

SEQ ID NO: 244 - protein, 247 aa, synthetic construct
EFQLQQSGPELVKPGASVKISCKASGYSFTDYNMNWVKQSNGKSLEWIGVINPNYGTTSYNQKFKGKATLTVDQSSSTAYMQLNSLTSEDSAVYYCAREGTSWYFDVWGTGTTVTVSSGGGGSGGGGSGGGGSDIVMTQSPTFLAVTASKKVTISCTASESLYSSKHKVHYLAWYQKKPEQSPKLLIYGASNRYIGVPDRFTGSGSGTDFTLTISSVQVEDLTHYYCAQFYSYPYTFGGGTKLEIKR

SEQ ID NO: 245 - protein, 250 aa, synthetic construct
QVQLKQSGPGLVQPSQSLSITCTVSGFSLTSYGVHWVRQSPGKGLEWLGVIWRGGSTDYNAAFMSRLSITKDNSKSQVFFKMNSLQADDTAIYYCAKKGDGYDWYFDVWGTGTTVTVSSGGGGSGGGGSGGGGSQLVLTQSSSASFSLGASAKLTCTLSSQHSTYTIEWYQQQPLKPPKYVMELKKDGSHSTGDGIPDRFSGSSSGADRYLSISNIQPEDEAIYICGVGDTIKEQFVYVFGGGTKVTVLG

SEQ ID NO: 246 - protein, 248 aa, synthetic construct
QVQLKQSGPGLVQPSQSLSITCTVSGFSLTSYGVHWVRQSPGKGLEWLGVIWSGGSTDYNAAFISRLSISKDNSKSQVFFKMNSLQADDTAIYYCAREGNYGSSYDAMDYWGQGTSVTVSSGGGGSGGGGSGGGGSDIVLTQSPASLAVSLGQRATISCRASQSVSTSSYSYMHWYQQKPGQPPKLLIKYASNLESGVPARFSGSGSGTDFTLNIHPVEEEDTATYYCQHSWEIPLTFGAGTKLELKR

SEQ ID NO: 247 - protein, 241 aa, synthetic construct
QVQLQQPGAELVMPGASVKLSCKASGYTFTSYWMHWVKQRPGQGLEWIGEIDPSDSYTNYNQKFKGKATLTVDKSSSTAYMQLSSLTSEDSAVYYCARSSNYPYAMDYWGQGTSVTVSSGGGGSGGGGSGGGGSQIVLTQSPAIMSASPGEKVTMTCSASSSVSYMHWYQQKSGTSPKRWIYDTSKLASGVPARFSGSGSGTSYSLTISSMEAEDAATYYCQQWSSNPLTFGAGTKLELKR

SEQ ID NO: 248 - protein, 237 aa, synthetic construct
EVQLQQSVAELVRPGASVKLSCTASGFNIKNTYMHWVKQRPEQGLEWIGRIDPANGNTKYAPKFQGKATITADTSSNTAYLQLSSLTSEDTAIYYCAYYSGLYWGQGTLVTVSAGGGGSGGGGSGGGGSDIQMTQSSSYLSVSLGGRVTITCKASDHINNWLAWYQQKPGNAPRLLISGATSLETGVPSRFSGSGSGKDYTLSITSLQTEDVATYYCQQYWSTPLTFGAGTKLELKR

SEQ ID NO: 249 - protein, 245 aa, synthetic construct
QVQLQQPGAELVRPGSSVKLSCKASGYTFTSYWMHWVKQRPIQGLEWIGNIDPSDSETHYNQKFKDKATLTVDKSSSTAYMQLSSLTSEDSAVYYCARRGQIYYGYSWFAYWGQGTLVTVSAGGGGSGGGGSGGGGSDIQMTQSPASLSASVGETVTITCRASENIYSYLAWYQQKQGKSPQLLVYNAKTLAEGVPSRFSGSGSGTQFSLKINSLQPEDFGSYYCQHHYGTPYTFGGGTKLEIKR

SEQ ID NO: 250 - protein, 243 aa, synthetic construct
EVQLQQSGPELVKPGASVKISCKASGYTFTDYYMNWVKQSHGKSLEWIGDINPNNGGTSYNQKFKGKATLTVDKSSSTAYMELRSLTSEDSAVYYCARSTVVADWYFDVWGTGTTVTVSSGGGGSGGGGSGGGGSDIQMTQSPASLSASVGETVTITCRASENIYSYLAWYQQKQGKSPQLLVYNAKTLAEGVPSRFSGSGSGTQFSLKINSLQPEDFGSYYCQHHYGTPPTFGGGTKLEIKR

SEQ ID NO: 251 - protein, 241 aa, synthetic construct
QVQLQQSGAELARPGASVKLSCKASGYTFTSYGISWVKQRTGQGLEWIGEIYPRSGNTYYNEKFKGKATLTADKSSSTAYMELRSLTSEDSAVYFCARSGSSYGYFDVWGTGTTVTVSSGGGGSGGGGSGGGGSQIVLTQSPAIMSASPGEKVTMTCSASSSVSYMHWYQQKSGTSPKRWIYDTSKLASGVPARFSGSGSGTSYSLTISSMEAEDAATYYCQQWSSNPPTFGAGTKLELKR

SEQ ID NO: 252 - protein, 246 aa, synthetic construct
QVQLKQSGPGLVQPSQSLSITCTVSGFSLTSYGVHWVRQSPGKGLEWLGVIWSGGSTDYNAAFISRLSISKDNSKSQVFFKMNSLQADDTAIYYCARKGGYDAYAMDYWGQGTSVTVSSGGGGSGGGGSGGGGSDIVLTQSPASLAVSLGQRATISCRASESVDNYGISFMNWFQQKPGQPPKLLIYAASNQGSGVPARFSGSGSGTDFSLNIHPMEEDDTAMYFCQQSKEVPPTFGGGTKLEIKR

SEQ ID NO: 253 - protein, 250 aa, synthetic construct
EFQLQQSGPELVKPGASVKISCKASGYSFTDYNMNWVKQSNGKSLEWIGVINPNYGTTSYNQKFKGKATLTVDQSSSTAYMQLNSLTSEDSAVYYCAREGFITTVVAVDYWGQGTTLTVSSGGGGSGGGGSGGGGSDIVMTQSPTFLAVTASKKVTISCTASESLYSSKHKVHYLAWYQKKPEQSPKLLIYGASNRYIGVPDRFTGSGSGTDFTLTISSVQVEDLTHYYCAQFYSYPYTFGGGTKLEIKR

SEQ ID NO: 254 - protein, 243 aa, synthetic construct
QVQLQQSGAELVRPGASVTLSCKASGYTFTDYEMHWVKQTPVHGLEWIGAIDPETGGTAYNQKFKGKAILTADKSSSTAYMELRSLTSEDSAVYYCTREGNYDAMDYWGQGTSVTVSSGGGGSGGGGSGGGGSQAVVTQESALTTSPGGTVILTCRSSTGAVTTSNYANWVQEKPDHLFTGLIGGTSNRAPGVPVRFSGSLIGDKAALTITGAQTEDDAMYFCALWYSTHYVFGGGTKVTVLG

SEQ ID NO: 255 - protein, 238 aa, synthetic construct
QVQLQQPGAELVRPGTSVKLSCKASGYTFTSYWMHWVKQRPGQGLEWIGVIDPSDSYTNYNQKFKGKATLTVDTSSSTAYMQLSSLTSEDSAVYYCARWDYYGVDYWGQGTTLTVSSGGGGSGGGGSGGGGSQIVLTQSPAIMSASPGEKVTMTCSASSSISYMHWYQQKPGTSPKRWIYDTSKLASGVPARFSGSGSGTSYSLTISSMEAEDAATYYCHQRSSYPTFGAGTKLELKR

SEQ ID NO: 256 - protein, 121 aa, synthetic construct
EVQLVESGGGLVQSGGSLRLSCAASGFTFSGYWMYWVRQAPGKGLEWVSAISPGGGSTYYPDSVKGRFTISRDNAKNTLYLQMNSLEPEDTALYYCASSLTATHTYEYDYWGQGTQVTVSS

SEQ ID NO: 257 - protein, 120 aa, synthetic construct
QVQLQQSGAELMKPGASVKISCKATGYTFSSYWIEWVKQRPGHGLEWIGEIFPGSGHTSFNEKFKGKATFTADTSSNTAYIQLSSLTSEDSAVYYCARRGYGYDEGFDYWGQGTTLTVSS

SEQ ID NO: 258 - protein, 120 aa, synthetic construct
QVQLQQSGAELMKPGASVKISCKATGYTLSSYWIEWVKQRPGHGLEWIGEILPGSGSTSYNEKFKGKATFTADTSSSTAYMQLSSLTSEDSAVYYCARRGYGYDEGFDYWGQGTTLTVSS

SEQ ID NO: 259 - protein, 108 aa, synthetic construct
LVKTGASVKISCKASGYSFTGYYMHWVKQSHGKSLEWIGYISSYNGATSYNQKFKGKATFTVDTSSSTAYMQFNSLTSEDSAVYYCARGRYGEYFDYWGQGTTLTVSS

SEQ ID NO: 260 - protein, 108 aa, synthetic construct
LVKTGASVKISCKASGYSFTGYYMHWVKQSHGKSLEWIGYISSYNGVTGYNQKFKGKATFTVDTSSSTAYMQFNSLTSEDSAVYYCARGRYGDYFDYWGQGTTLTVSS

SEQ ID NO: 261 - protein, 108 aa, synthetic construct
LVKTGASVKISCKASGYSFTGYYMHWVKQSHGKSLEWIGYISSYNGVTSYNQKFKGKATFTVDTSSSTAYMHFNSLTSEDSAVYYCARGRYGDYFDYWGQGTTLTVSS

SEQ ID NO: 262 - protein, 108 aa, synthetic construct; identical to SEQ ID NO: 260

SEQ ID NO: 263 - protein, 108 aa, synthetic construct
LVKTGASVKISCKASGYSFTGYYMHWVKQSHGKSLEWIGYISSYNGANGYNQKFKGKATFTVDTSSSTAYMQFNSLTSEDSAVYYCARGRYGDYFDYWGQGTTLTVSS

SEQ ID NO: 264 - protein, 108 aa, synthetic construct; identical to SEQ ID NO: 260

SEQ ID NO: 265 - protein, 108 aa, synthetic construct; identical to SEQ ID NO: 260

SEQ ID NO: 266 - protein, 108 aa, synthetic construct; identical to SEQ ID NO: 260

SEQ ID NO: 267 - protein, 108 aa, synthetic construct
LVKTGASVKISCKASGYSFTGYYMHWVKQSHGKSLEWIGYISSYNGVTGYNQKFKGKATFTVDTSSSTAYMQFNSLTSEDSAVYYCARGRYGDYFDYWGQGTTLAVSS

SEQ ID NO: 268 - protein, 108 aa, synthetic construct
LVKTGASVKISCKASGYSFTGFYMHWVKQSHGKGLEWIGYISSYNGATGYNQKFKGKATFTVDTSSSTAYMQFNSLTSEDSAVYYCARGRYGDYFDYWGQGTTLTVSS

SEQ ID NO: 269 - protein, 108 aa, synthetic construct
LVKTGASVKISCKASGYSFTGYYMHWVKQSHGKSLEWIGYISSYNGATGYNQKFKGKATFTVDTSSSTAYMQFNSLTSEDSAVYYCARGRYGDYFDYWGQGTTLTVSS

SEQ ID NO: 270 - protein, 118 aa, synthetic construct
QVQLQQPGAELVKPGASVKLSCKASGYTFTSYWMHWVKQRPGQGLEWIGMIHPNSGTTNYNEKFKSKATLTVDKSSSTAYMQLSSLTSEDSAVYYCARWGDGYSFAYWGQGTLVTVSA

SEQ ID NO: 271 - protein, 119 aa, synthetic construct
QVQLKQSGPELVKPGASVKMSCKASGYTFTDYVINWVKQRTGQGLEWIGEIYPGSGSSYYNEKFKGKATLTADKSSNTAYMQLSSLTSEDSAVYFCARRGERGPWFAYWGQGTLVTVSA

SEQ ID NO: 272 - protein, 117 aa, synthetic construct
QVQLQQPGAELIKPGASVKLSCKASGYTFTSYWMHWVKQRPGQGLEWIGMIHPNSGSTNYNEKFKSKATLTVDKSSSTAYMQLSSLTSEDSAVYYCARPGGYGFVYWGQGTLVTVSA

SEQ ID NO: 273 - protein, 123 aa, synthetic construct
EVQLQQSGAELVKPGASVKLSCTPSGFNIKDTSLHWVKQGPEQGLEWIGRIDPANGNTKYDPKFQGKATITADTSSNTAYLQLSSLTSEDTAVYYCARGPDDGYFYYYSMDYWGQGTSVTVSS

SEQ ID NO: 274 - protein, 118 aa, synthetic construct
QVQLQQSGPELKKPGETVKISCKASGYTFTNYGMNWVKQAPGKGLKWMGWINTYTGEPTYADDFKGRFAFSLETSASTAYLQINNLKNEDMATYFCARKYYDYEFAYWGQGTLVTVSA

SEQ ID NO: 275 - protein, 120 aa, synthetic construct
QVQLQESGGGLVKPGGSLKLSCAASGFTFSSYAMSWVRQTPEKRLEWVATISSGGSYTYYPDSVKGRFTISRDNAKNTLYLQMSSLRSEDTAMYYCARHEEANWAWFAYWGQGTLVTVSA

SEQ ID NO: 276 - protein, 121 aa, synthetic construct
QVQLKQSGPGLVQPSQSLSITCTVSGFSLTSYGVHWVRQSPGKGLEWLGVIWSGGSTDYNAAFISRLSISKDNSKSQVFFKMNSLQANDTAIYYCASYYGSSRSYWYLDVWGAGTTVTVSS

SEQ ID NO: 277 - protein, 120 aa, synthetic construct
QVKLVESGGDLVKPGGSLKLSCATSGFTFSSYGMSWVRQTPDKRLEWVATISSGGSYTYYPDSVKGRFTISRDNAKNTLYLQMSSLKSEGTAMYYCARHNYSNWDWFAYWGQGTLVTVSA

SEQ ID NO: 278 - protein, 123 aa, synthetic construct; identical to SEQ ID NO: 273

SEQ ID NO: 279 - protein, 120 aa, synthetic construct
QVQLQQSGAELMKPGASVKISCKATGYTFSSYWIEWVKQRPGHGLEWIGEILPGSGSTSYNEKFKGKATFTADTSSNTAYMQLSSLTSEDSAVYYCARRGYGYDEGFDYWGQGTTLTVSS

SEQ ID NO: 280 - protein, 118 aa, synthetic construct
QVQLQQPGAELVRPGASVKLSCKASGYTFTNYWMNWVKQRPGQGLEWIGLIDPSDSETHYNQVFKDKATLTVDKSSSTAYMQLSSLTSEDSAVYYCATYDVYYRFAYWGQGTLVTVSA

SEQ ID NO: 281 - protein, 115 aa, synthetic construct
QVQLQQPGAELVRPGASVKLSCKASGYTFTSYWINWVKQRPGQGLEWIGNIYPSDSYTNYNQKFKDKATLTVDKSSSTAYMQLSSPTSEDSAVYYCTRGNYIDYWGQGTTLTVSS

SEQ ID NO: 282 - protein, 120 aa, synthetic construct
QVQLKESGPGLVAPSQSLSIPCTVSGFSLTSYGVHWVRQPPGKGLEWLGVIWAGGTTNYNSALMSRLSISKDNSKSQVFLKMYSLQTDDTAMYYCARGDGYDDGYAMDYWGQGTSVTVSS

SEQ ID NO: 283 - protein, 122 aa, synthetic construct
QVQLQQSGAELVKPGASVKLSCKASGSTFTTYYIYWVKQRPGQGLEWIGEINPSNGGTNFNEKFKSKATLTVDKSSSTAYMQLSSLTSEDSAVYYCTSYYTHETYYYAMDYWGQGTSVTVSS

SEQ ID NO: 284 - protein, 122 aa, synthetic construct
QVQLQQPGAELVKPGASVKLSCKASGYTFTSYWMQWVKQRPGQGLEWIGEIDPSDSYTNYNQKFKGKATLTVDTSSSTAYMQLSSLTSEDSAVYYCARAEYGYGNYPWFAYWGQGTLVTVSA

SEQ ID NO: 285 - protein, 120 aa, synthetic construct
QVQLQQPGAELVKPGASVKVSCKASGYTFTSYWMHWVKQRPGQGLEWIGRIHPSDSDTNYNQKFKGKATLTVDKSSSTAYMQLSSLTSEDSAVYYCAIPYYYGGWYFDVWGTGTTVTVSS

SEQ ID NO: 286 - protein, 120 aa, synthetic construct
EVKLVESGGDLVKPGGSLKLSCAASGFTFSSYGMSWVRQTPDKRLEWVATISSGGSYTYYPDSVKGRFTISRDNAKNTLYLQMSSLKSEDTAMYYCARLYDAHWDYFDYWGQGTTLTVSS

SEQ ID NO: 287 - protein, 120 aa, synthetic construct
QVQLQQPGSVLVRPGASVKLSCKASGYTFTSSWMHWAKQRPGQGLEWIGEIHPNSGNTNYNEKFKGKATLTVDTSSSTAYVDLSSLTSEDSAVYYCAIYYDYDAYYFDYWGQGTTLTVSS

SEQ ID NO: 288 - protein, 118 aa, synthetic construct
QVQLQQPGAELVKPGASVKLSCKASGYTFTSYWMHWVKQRPGQGLEWIGMIHPNSGSTNYNEKFKSKATLTVDKSSSTAYMQLSSLTSEDSAVYYCANPYYGYDVGYWGQGTTLTVSS

SEQ ID NO: 289 - protein, 120 aa, synthetic construct
EVQLVESGGDLVKPGGSLKLSCAASGFTFSSYGMSWVRQTPDKRLEWVATISSGGSYTYYPDSVKGRFTISRDNAKNTLYLQMSSLKSEDTAMYYCTRHDDSSYDWFAYWGQGTLVTVSA

SEQ ID NO: 290 - protein, 118 aa, synthetic construct
QVQLQQPGAELVKPGASVKLSCKASGYTFTNYWMHWVKQRPGQGLEWIGMIHPNSGTTNYNEKFKSKATLTVDKSSSTTYMQLISLTSEDSAVYYCARFGDGYHFDYWGQGTTLTVSS

SEQ ID NO: 291 - protein, 116 aa, synthetic construct
QVQLQQSGPELKKPGETVKISCKASGYTFTNYGMNWVKQAPGKGLKWMGWINTNTGEPTYAEEFKGRFAFSLETSASTAYLQINNLKNEDTATYFCARWYPYFDYWGQGTTLTVSS

SEQ ID NO: 292 - protein, 121 aa, synthetic construct
QVQLQQSGAELAKPGASVKLSCKASGYTFTSYWMHWVKQRPGQGLEWIGYINPSSGYTKYNQKFKDKATLTADKSSSTAYMQLSSLTYEDSAVYYCARSDGSSGNWYFDVWGTGTTVTVSS

SEQ ID NO: 293 - protein, 120 aa, synthetic construct
QVQLQQPGAELVKPGASVKLSCKASGYTFTSYWMHWVKQRPGQGLEWIGMIHPNSGSTNYNEKFKSKATLTVDKSSSTAYMQLSSLTSEDSAVYYCARDYGNYDYAMDYWGQGTSVTVSS

SEQ ID NO: 294 - protein, 120 aa, synthetic construct
QVQLQQSGAELMKPGASVKISCKATGYTFSSYWIEWVKQRPGHGLEWIGEILPGSGSTSYNEKFKDKATFTADTSSNTAFMQLSSLTSEDSAVYYCARRAYGYDEGFDYWGQGTTLTVSS

SEQ ID NO: 295 - protein, 120 aa, synthetic construct
QVQLQQSGAELMKPGASVKISCKATGYTFSSYWIEWVRQAPGHGLEWIGEVLPGSGSTSYNEKFKGRATFTADTSSNTAYMQLSSLRSEDSAVYYCARRAYGYDEGFDYWGQGTTVTVSS

SEQ ID NO: 296 - protein, 120 aa, synthetic construct
QVQLQQSGAELMKPGASVKISCKATGYTFSSYWIEWVRQAPGHGLEWIGEILPGSGRTSYIEKFKGRATFTADTSSNTAYMQLSSLRSEDSAVYYCARRGYGYDEGFDYWGQGTTVTVSS

SEQ ID NO: 297 - protein, 120 aa, synthetic construct
QVQLQQSGAELMKPGASVKISCKATGYTFSSYWIEWVKQRPGHGLEWIGEVLPGSGSTSYNEKFKGKATFTADTSSNTAYMQLSSLTSEDSAVYYCARRAYGYDEGFDYWGQGTTLTVSS

SEQ ID NO: 298 - protein, 120 aa, synthetic construct
QVQLQQSGAELMKPGASVKISCKATGYTFSSYWIEWVKQRPGHGLEWIGEILPGSGRTSYIEKFKGKATFTADTSSNTAYMQLSSLTSEDSAVYYCARRGYGYDEGFDYWGQGTTLTVSS

SEQ ID NO: 299 - protein, 120 aa, synthetic construct
QVQLQQSGAELMKPGASVKISCKATGYTFSSYWIEWVKQRPGHGLEWIGEILPGSGSTNYNEKFKGKATFTADTSSNTAYMQLSSLTSEDSAVYYCARRAYGYDGGFDYWGQGTTLTVSS

SEQ ID NO: 300 - protein, 120 aa, synthetic construct
QVQLQQSGAELMKPGASVKISCKATGYTFSSYWIEWVKQRPGHGLEWIGEILPGSDSTSYNEKFKGKTTFTADTSSNTAYMQLSSLTSEDSAVYYCARRAYGYDEGFDYWGQGTTLTVSS

SEQ ID NO: 301 - protein, 120 aa, synthetic construct
QVQLQQSGAELMKPGASVKISCKATAYTFSIYWIEWVKQRPGHGLEWIGEILPGSGSTNYNEKVKGKATFTADTSSNTAYMQLSSLTSEDSAVYYCARRAYGYDGGFDYWGQGTTLTVSS

SEQ ID NO: 302 - protein, 120 aa, synthetic construct; identical to SEQ ID NO: 257

SEQ ID NO: 303 - protein, 120 aa, synthetic construct
QVQLQQSGAELMKPGASVKMSCKATGYTFSNYWIEWVKQRPGHGLEWIGEILPGSGSTSYNEKFKGKATFTADTSSSTAYMQLSSLTSEDSAVYYCARRGYGYDEGFDYWGQGSTLTVSS

SEQ ID NO: 304 - protein, 120 aa, synthetic construct; identical to SEQ ID NO: 279

SEQ ID NO: 305 - protein, 120 aa, synthetic construct
QVQLQQSGAELMKPGASVKISCKATGYTFSSYWIEWVQQRPGHGLEWIGEILPGSGYTSYIEQFKGKATFTADTSSNTAYMQLGSLTSEDSAVYYCARRGYGYDEGFDYWGQGTTLTVSS

SEQ ID NO: 306 - protein, 120 aa, synthetic construct; identical to SEQ ID NO: 258

SEQ ID NO: 307 - protein, 120 aa, synthetic construct
QVQLQQSGAELMKPGASVKISCKGTGYTFSSYWIEWVKQRPGHGLEWIGEISPGSGSTNYNEKFKGKATFTADTSSNTAYMQLSSLTSEDSAVYYCARRGYGYDEGFDYWGQGTTLTVSS

SEQ ID NO: 308 - protein, 120 aa, synthetic construct
QVQLQQSGAELMKPGASVKISCKATGYTFGTYWIEWVKQRPGHGLEWIGEILPGSGTPNYNEKFKGKATFTADTSSNTAYMQLSSLTSEDSAVYYCARRAYGYDAGFDYWGQGTTLTVSS

SEQ ID NO: 309 - protein, 120 aa, synthetic construct
QVQLQQSGAELMKPGASVKISFKATGYTFSSYWIEWVKQRPGHGLEWIGEILPGSGSTSCNEKFKGKATFTADTSSNTAYMQLSSLTSEDSAVYYCARRGYGYDEGFDYWGQGTTLTVSS

SEQ ID NO: 310 - protein, 120 aa, synthetic construct; identical to SEQ ID NO: 298

SEQ ID NO: 311 - protein, 120 aa, synthetic construct
QVQLQQSGAELMKPGASVKMSCKATGYTFSNYWIEWVKQRPGHCLEWIGEILPGSGSTSYNEKFKGKATFTADTSSSTAYMQLSSLTSEDSAVYYCARRGYGYDEGFDYWGQGSTLTVSS

SEQ ID NO: 312 - protein, 120 aa, synthetic construct
QVQLQQSGAELMKPGASVKISCKATGYTFSSYWIEWVKQRPGHCLEWIGEILPGSGSTSYNEKFKGKATFTADTSSNTAYMQLSSLTSEDSAVYYCARRGYGYDEGFDYWGQGTTLTVSS

SEQ ID NO: 313 - protein, 108 aa, synthetic construct; identical to SEQ ID NO: 260

SEQ ID NO: 314 - protein, 108 aa, synthetic construct; identical to SEQ ID NO: 259

SEQ ID NO: 315 - protein, 118 aa, synthetic construct
QVQLKQSGPGLVQPSQSLSITCTVSGFSLSSYGVHWVRQSPGKALEWLGVIWRGGSTDYNAAFMSRLSITKDNSKSQVFFKMNSLQADDTAIYYCAKNLYGHYVMDYWGQGTSVTVSS

SEQ ID NO: 316 - protein, 118 aa, synthetic construct
QVQLKQSGPGLVQPSQSLSITCTVSGFSVTSYGVHWVRQSPGKGLEWLGVIWRGGSTDYNAAFMSRLSITKDNSKSQVFFKMNSLQADDSAIYYCAKNLYGHYVMDYWGQGTSVTVSS

SEQ ID NO: 317 - protein, 118 aa, synthetic construct
QVQLKQSGPGPVQPSQSLSITCTVSGFSLTSYGVHWVRQSPGKGLEWLGVIWRGGSTDNNAAFMSRLSITKDNSKSQVFFKMNSLQADDTAIYYCAKNLYGHYVMDYWGQGTSVTVSS

SEQ ID NO: 318 - protein, 118 aa, synthetic construct
QVQLKQSGPGLVQPSQSLSITCTVSGFSLTRYGVHWVRQSPGKGLEWLGVIWRGGSTDHNAAFMSRLSITKDNSKSQVFFKMNSLQADDTAIYYCAKNLYGHYVMDYWGQGTSVTVSS

SEQ ID NO: 319 - protein, 118 aa, synthetic construct
QVQLKQSGPGLVQPSQSLSITCTVSGFSVTTYGVHWVRQSPGKGLEWLGVIWRGGSTDYNAAFMSRLSITKDNSKSQVFFKMNSLQADDTAIYYCAKNLYGHYVMDYWGQGTSVTVSS

SEQ ID NO: 320 - protein, 118 aa, synthetic construct
QVQLQQPGAELVKPGASVKLSCKASGYTFTSYWMHWVKQRPGQGLEWIGMIHPNSGSTNYNEKFKSKATLTVDKSSSTAYMQLSSLTSEDSAVYYCARWGDGYSFAYWGQGTLVTVSA

SEQ ID NO: 321 - protein, 118 aa, synthetic construct; identical to SEQ ID NO: 270

SEQ ID NO: 322 - protein, 119 aa, synthetic construct
QVQLKQSGPELVKPGASVKMSCKASGYTFTDYVINWVKQRTGQGLEWIGEIYPGSGSTYYNEKFKGKATLTADKSSNTVYMQLSSLTSEDSAVYFCARRGERGPWFAYWGQGTLVTVSA

SEQ ID NO: 323 - protein, 119 aa, synthetic construct; identical to SEQ ID NO: 271

SEQ ID NO: 324 - protein, 119 aa, synthetic construct
QVQLKQSGPELVKPGASVKMSCKASGYTFTDYVINWVKQRTGQGLEWIGEIYPGSGSSYYNEKFRGKATLTADKSSNTAYMQLSSLTSEDSAVYFCARRGERGPWFAYWGQGTLVTVSA

SEQ ID NO: 325 - protein, 119 aa, synthetic construct
QVQLKQSGPELVKPGASVKMSCKASGYTFTDYVINWVKQKTGQGLEWIGEIYPGSGSSYYNEKFKGKATLTADKSSNTAYIQLSSLTSEDSAVYFCARRGERGPWFAYWGQGTLVTVSA

SEQ ID NO: 326 - protein, 117 aa, synthetic construct
QVQLQQPGAELVKPGASVKLSCKASGYTFTSYWMHWVKQRPGQGLEWIGMIHPNSGSPNYNEKFKSKATLTVDKSSSTAYMQLSSLTSEDSAVYYCARPGGYGFAYWGQGTLVTVSA

SEQ ID NO: 327 - protein, 117 aa, synthetic construct
QVQLQQSGPELVKPGASVKMSCKASGYTFTDYVISWVKQRTGQGLEWIGEIYPGSGSSYYNEKFKGKATLTADKSSNTAYMQLSSLTSEDSAVYFCARPGDLGFAYWGQGTLVTVSA

SEQ ID NO: 328 - protein, 117 aa, synthetic construct; identical to SEQ ID NO: 327

SEQ ID NO: 329 - protein, 117 aa, synthetic construct
QVQLQQSGPELVKPGASVKMSCKASGYTFTDYVISWVKQRTGQGLEWIGEIYPGSGSNYYNEKFKGKAIMTADKSSNTAYMQLSSLTSEDSAVYFCARPGDLGFAYWGQGTLVTVSA

SEQ ID NO: 330 - protein, 117 aa, synthetic construct; identical to SEQ ID NO: 327

SEQ ID NO: 331 - protein, 117 aa, synthetic construct
QVQLQQSGPELVKPGASVKMSCKASGYTFTDYVISWVRQAPGQGLEWIGEIYPGSGSSYYNEKFKGRATLTADKSSNTAYMQLSSLRSEDSAVYFCARPGDLGFAYWGQGTLVTVSS

SEQ ID NO: 332 - protein, 117 aa, synthetic construct
QVQLQQSGPELVKPGASVKMSCKASGYTFTDYVISWVKQRTGQGLEWIGEIYPGSGSSYYNEKFKGKATLTADKSSNTAYMQLSSLTSEDSAVYFCARPGDLGFAYWGQGTLVTVSS

SEQ ID NO: 333 - protein, 120 aa, synthetic construct
QVQLKESGPGLVAPSQSLSITCTVSGFSLTNYGVHWVRQPPGKGLEWLGVVWAGGITNYNWALMSRLSISKDNSKSQVFLKMNSLQTDDTAMYYCARGDGYDDGYAMDYWGQGTSVTVSS

SEQ ID NO: 334 - protein, 120 aa, synthetic construct
QVQLKESGPGLVAPSQSLSITCTVSGFSLTSYGVHWVRQPPGKGLEWLGVLWAGGITNYNSALMSRLSIRKDNSKSQVFLKMYSLHTDDTAMYYCARGDGYDDGYAMDYWGQGTSVTVSS

SEQ ID NO: 335 - protein, 120 aa, synthetic construct; identical to SEQ ID NO: 282

SEQ ID NO: 336 - protein, 120 aa, synthetic construct
EVQLQQSGAELVRSGASVKLSCTASGFNIKDYYMHWVKQRPEQGLEWIGWIDPENGDTEYAPKFQGKATMTADTSSNTAYLQLSSLTSEDTAVYYCNAPLLRYSSAMDYWGQGTSVTVSS

SEQ ID NO: 337 - protein, 120 aa, synthetic construct
EVQLQQSGAELVRSGASVKLSCTASGFNIKDYYIHWVKQRPEQGLEWIGWIDPENGDTEYAPKFQGKATMTADTSSNTAYLQLSSLTSEDTAVYYCNAPLLRYSSSMDYWGQGTSVTVSS

SEQ ID NO: 338 - protein, 120 aa, synthetic construct
EVQLQQSGAELVRSGASVKLSCTASGFNIKDYYMHWVKQRPEQGLEWIGWIDPENGDTEYAPKFQGKATMTADTSSNTAYLQLSSLTSEDTAVYYCNVALLRYSSAMDYWGQGTSVTVSS

SEQ ID NO: 339 - protein, 119 aa, synthetic construct
QVQLQQSGPELVKPGASVKMSCKASGYTFTDYVISWVKQRTGQGLEWIGEIYPGSGSTYYNEKFKGKATLTADKSSNTAYMQLSSLTSEDSAVYFCARRGERGPWFAYWGQGTLVTVSA

SEQ ID NO: 340 - protein, 122 aa, synthetic construct; identical to SEQ ID NO: 284

SEQ ID NO: 341 - protein, 118 aa, synthetic construct; identical to SEQ ID NO: 274

SEQ ID NO: 342 - protein, 118 aa, synthetic construct
QVQLQQSGAELVRPGASVTLSCKASGYTFTDYEMHWVKQTPVHGLEWIGAIDPETGGTAYNQKFKVKAILTADKSSSTAYMELRSLTSEDSAVYYCTRLGDYDVMDYWGQGTSVTVSS

SEQ ID NO: 343 - protein, 120 aa, synthetic construct; identical to SEQ ID NO: 287

SEQ ID NO: 344 - protein, 117 aa, synthetic construct
QVQLQQSGPELVKPGASVKMSCKASGYTFTDYVISWVKQRTGQGLEWIGEIYPGSGSNYYNEKFKGKATLTADKSSNTAYMQLSSLTSEDSAVYFCAREEKIYFDYWGQGTTLTVSS

SEQ ID NO: 345 - protein, 119 aa, synthetic construct
EVQLQQSGTVLARPGASVKMSCKTSGYTFTSYWMHWIKQRPGQGLEWIGAIYPGNSDTTYNQKFKGKAKLTAVTSASTAYMELSSLTNEDSAVYYCTSLITTAYYFDYWGQGTTLTVSS

SEQ ID NO: 346 - protein, 120 aa, synthetic construct; identical to SEQ ID NO: 275

SEQ ID NO: 347 - protein, 116 aa, synthetic construct
QVQLQQSGPQLVSPGASVKISCKASGYSFTNYWMHWVKQRPGQGLEWIGMIDPSDSETRLNQQFKDKATLTVDESSSTAYMQLSSPTSEDSAVYYCAIPYYAMDYWGQGTSVTVSS

SEQ ID NO: 348 - protein, 120 aa, synthetic construct
QVQLQQPGSVLVRPGASVKLSCKASGYTFTSSWMHWAKQRPGQGLEWIGEIHPNSGNTNYNEKNKGKATLTVDTSSSTAYVDLSSLTSEDSAVYYCATYYGNYVWYFDVWGAGTSVTVSS

SEQ ID NO: 349 - protein, 119 aa, synthetic construct
QVQLQQPGAELVKPGASVKLSCKASGYTFTSYWMHWVKQRPGQGLEWIGMIHPNSGSTNYNEKFKSKATLTVDKSSSTAYMQLSSLTSEDSAVYYCASYGSSYWYFDVWGTGTTVTVSS

SEQ ID NO: 350 - protein, 121 aa, synthetic construct; identical to SEQ ID NO: 276

SEQ ID NO: 351 - protein, 120 aa, synthetic construct
QVKLVESGGDLVKPGGSLKLSCAASGFTFSSYGMSWVRQTPDKRLEWVATISSGGSYTYYPDSVKGRFTISRDNAKNTLYLQMSSLKSEDTAMYYCARQNDSSWAWFAYWGQGTLVTVSA

SEQ ID NO: 352 - protein, 120 aa, synthetic construct
QVQLQQPGAELVKPGASVKLSCKASGYTFTSYWMHWVKQRPGQGLEWIGMIHPNSGSTNYNEKFKSKATLTVDKSSSTAYMQLSSLTSEDSAVYYCALPYSNYGWYFDVWGTGTTVTVSS

SEQ ID NO: 353 - protein, 120 aa, synthetic construct
QVQLQQPGAELVRPGSSVKLSCKASGYTFTSYWMHWVKQRPIQGLEWIGNIDPSDSETHYNQKFKDKATLTVDKSSSTAYMQLSSLTSEDSAVYYCARDYYGSYWYFDVWGTGTTVTVSS

SEQ ID NO: 354 - protein, 118 aa, synthetic construct
EVQLQQSGAELVKPGASVKLSCTASGFNIKDYYMHWVKQRTEQGLEWIGRIDPEDGETKYAPKFQGKATITADTSSNTAYLQLSSLTSEDTAVYYCAAYGNSAWFAYWGQGTLVTVSA

SEQ ID NO: 355 - protein, 116 aa, synthetic construct
QVQLQQSGPELKKPGETVKISCKASGYTFTNYGMNWVRQAPGKGLEWMGWINTNTGEPTYAEEFKGRFAFSLETSASTAYLQINNLRNEDTATYFCARWYPYFDYWGQGTTVTVSS

SEQ ID NO: 356 - protein, 116 aa, synthetic construct; identical to SEQ ID NO: 291

SEQ ID NO: 357 - protein, 121 aa, synthetic construct; identical to SEQ ID NO: 292

SEQ ID NO: 358 - protein, 118 aa, synthetic construct
QVQLKESGPGLVAPSQSLSITCTVSGFSLTSYGVHWVRQPPGKGLEWLGVIWAGGSTNYNSALMSRLSISKDNSKSQVFLKMNSLQTDDTAMYYCAREGGYTGYFDVWGAGTTVTVSS

SEQ ID NO: 359 - protein, 120 aa, synthetic construct
QVQLQQPGAELVRPGSSVKLSCKASGYTFTSYWMHWVKQRPIQGLEWIGNIDPSDSETHYNQKFKDKATLTVDKSSSTAYMQLSSLTSEDSAVYYCAYSNYVPYYAMDYWGQGTSVTVSS

SEQ ID NO: 360 - protein, 120 aa, synthetic construct; identical to SEQ ID NO: 293

SEQ ID NO: 361 - protein, 117 aa, synthetic construct
EVQLQQSGAELVRPGALVKLSCKASGFNIKDYFMHWVKQRPEQCLEWIGWIDPETDNTIYDPKFQGKASITADTSSNTAYLQLSSLTSEDTAVYYCARSGNMGFTYWGQGTLVTVSA

SEQ ID NO: 362 - protein, 120 aa, synthetic construct
EVMLVESGGGLVKPGGSLKLSCAASGFTFSSYAMSWVRQTPEKCLEWVATISSGGSYTYYPDSVKGRFTISRDNAKNTLYLQMSSLRSEDTAMYYCASQGGSSWGAMDYWGQGTSVTVSS

SEQ ID NO: 363 - protein, 119 aa, synthetic construct
QVQLKQSGPGLVQPSQSLSITCTVSGFSLTSYGVHWVRQSPGKCLEWLGVIWSGGSTDYNAAFISRLSISKDNSKSQVFFKMNSLQADDTAIYYCARKGYGYDWYFDVWGTGTTVTVSS

SEQ ID NO: 364 - protein, 119 aa, synthetic construct
QVQLQQPGAELVMPGASVKLSCKASGYTFTSYWMHWVKQRPGQCLEWIGEIDPSDSYTNYNQKFKGKATLTVDKSSSTAYMQLSSLTSEDSAVYYCARSSYYYYAMDYWGQGTSVTVSS

SEQ ID NO: 365 - protein, 120 aa, synthetic construct; identical to SEQ ID NO: 299

SEQ ID NO: 366 - protein, 120 aa, synthetic construct
QVQLQQSGAELMKPGASVKISFKATGYTFSSYWIEWVKQRPGHGLEWIGEILPGSGSTNYIEKFKGKATFTADTSSNTAYMQLSSLTSEDSAVYYCARRAYGYDEGFDYWGQGTTLTVSS

SEQ ID NO: 367 - protein, 120 aa, synthetic construct; identical to SEQ ID NO: 300

SEQ ID NO: 368 - protein, 120 aa, synthetic construct; identical to SEQ ID NO: 301

SEQ ID NO: 369 - protein, 120 aa, synthetic construct
QVQLQQSGAELMKPGASVKISCKATGYTFSSYWIEWVKQRPGHGLEWIGEILPGSGSTNYNEKFKGKATFTADTSSNTAYMQLSSLTSEDSAVYYCARRGYGYDEGFDYWGQGTTLTVSS

SEQ ID NO: 370 - protein, 120 aa, synthetic construct; identical to SEQ ID NO: 369

SEQ ID NO: 371 - protein, 120 aa, synthetic construct; identical to SEQ ID NO: 303

SEQ ID NO: 372 - protein, 120 aa, synthetic construct; identical to SEQ ID NO: 305

SEQ ID NO: 373 - protein, 120 aa, synthetic construct; identical to SEQ ID NO: 294

SEQ ID NO: 374 - protein, 120 aa, synthetic construct; identical to SEQ ID NO: 297

SEQ ID NO: 375 - protein, 120 aa, synthetic construct; identical to SEQ ID NO: 307

SEQ ID NO: 376 - protein, 120 aa, synthetic construct; identical to SEQ ID NO: 308

SEQ ID NO: 377 - protein, 120 aa, synthetic construct; identical to SEQ ID NO: 309

SEQ ID NO: 378 - protein, 120 aa, synthetic construct; identical to SEQ ID NO: 298

SEQ ID NO: 379 - protein, 120 aa, synthetic construct; identical to SEQ ID NO: 298

SEQ ID NO: 380 - protein, 118 aa, synthetic construct; identical to SEQ ID NO: 315

SEQ ID NO: 381 - protein, 118 aa, synthetic construct; identical to SEQ ID NO: 316

SEQ ID NO: 382 - protein, 118 aa, synthetic construct; identical to SEQ ID NO: 317

SEQ ID NO: 383 - protein, 118 aa, synthetic construct; identical to SEQ ID NO: 318

SEQ ID NO: 384 - protein, 118 aa, synthetic construct; identical to SEQ ID NO: 319

SEQ ID NO: 385 - protein, 118 aa, synthetic construct
QVQLKQSGPGLVQPSQSLSITCTVSGFSVTSYGVHWVRQSPGKGLEWLGVIWRGGSTDYNAAFMSRLSITKDNSKSQVFFKMNSLQADDTAIYYCAKNLYGHYVMDYWGQGTSVTVSS

SEQ ID NO: 386 - protein, 118 aa, synthetic construct; identical to SEQ ID NO: 318

SEQ ID NO: 387 - protein, 118 aa, synthetic construct; identical to SEQ ID NO: 320

SEQ ID NO: 388 - protein, 118 aa, synthetic construct; identical to SEQ ID NO: 320

SEQ ID NO: 389 - protein, 118 aa, synthetic construct
QVQLQQPGAELVKPGASVKLSCKASGYTFTTYWMHWVKQRPGQGLEWIGMIHPNSDNTNYNEKFKSKATLTVDKSSSTAYIQLSSLTSEDSAVYYCARWGDGYSFAYWGQGTLVTVSA

SEQ ID NO: 390 - protein, 118 aa, synthetic construct
QVQLQQPGAELVKPGASVKLSCKASGYTFTSYWMHWVKQRPGQGLEWIGMIHPNSGNTNYNEKFKSKATLTVDKSSSTAYMQLSSLTSEDSAVYYCARWGDGYSFAYWGQGTLVTVSA

SEQ ID NO: 391 - protein, 119 aa, synthetic construct; identical to SEQ ID NO: 322

SEQ ID NO: 392 - protein, 119 aa, synthetic construct; identical to SEQ ID NO: 271

SEQ ID NO: 393 - protein, 119 aa, synthetic construct; identical to SEQ ID NO: 324

SEQ ID NO: 394 - protein, 119 aa, synthetic construct; identical to SEQ ID NO: 325

SEQ ID NO: 395 - protein, 118 aa, synthetic construct
QVQLQQPGAELVRPGASVKLSCKASGYTFTNYWMNWVKQRPGQGLEWIGMIDPSDSETHYNQMFKDKATLTVDKSSSTAYMQLSSLTSEDSAVYYCATYDGYYRFAYWGQGTLVTVSA

SEQ ID NO: 396 - protein, 118 aa, synthetic construct
QVQLQQPGAELVRPGASVRLSCKASGYTFTNYWMNWVKQRPGQGLEWIGMIDPSDSETHFNQMFKDKATLTVDKSSSTAYMQVSSLTSEDSAVYYCATYDIYYRFAYWGQGTLVTVSA

SEQ ID NO: 397 - protein, 117 aa, synthetic construct
QVQLQQPGAELVKPGASVKLSCKASGYTFTSYWMHWVKQRPGQGLEWIGMIHPNSDSTNYNEKFKSKATLTVDKSSSTAYMHLSSLTSEDSAVYYCARPGGYGFADWGQGTLVTVSA

SEQ ID NO: 398 - protein, 117 aa, synthetic construct
QVQLQQPGAELVKPGASVKLSCKASGYTFTTYWMHWVKQRPGQGLEWIGMIHPNSGSTNYNEKFKSKATLTVDKSSSTAYMQLSSLTSEDSAVYYCARPGGYGFTYWGQGTLVTVSA

SEQ ID NO: 399 - protein, 117 aa, synthetic construct; identical to SEQ ID NO: 326

SEQ ID NO: 400 - protein, 115 aa, synthetic construct; identical to SEQ ID NO: 281

SEQ ID NO: 401 - protein, 115 aa, synthetic construct
QVQLQQPGAELVRPGASVKLSCKASGYTFTDYWINWVKQRPGQGLEWIGNIYPSDSYTNYNQKFKDKATLTVDKSSSTAYMQLSSPTSEDSAVYYCTRGNYIDYWGQGTTLTVSS

SEQ ID NO: 402 - protein, 117 aa, synthetic construct; identical to SEQ ID NO: 327

SEQ ID NO: 403 - protein, 117 aa, synthetic construct; identical to SEQ ID NO: 329

SEQ ID NO: 404 - protein, 117 aa, synthetic construct; identical to SEQ ID NO: 327

SEQ ID NO: 405 - protein, 120 aa, synthetic construct; identical to SEQ ID NO: 333

SEQ ID NO: 406 - protein, 120 aa, synthetic construct; identical to SEQ ID NO: 334

SEQ ID NO: 407 - protein, 113 aa, synthetic construct
QVQLQQSGPQLVSPGASVKISCKASGYSFTSYWMYWVKQRPGQGLEWIGMIDPSDSETRLNQKFKDRATLTVDKSSSTAYMQLSSPTSEDSAVYYCARTRNYWGQGTTLTVSS

SEQ ID NO: 408 - protein, 113 aa, synthetic construct
QVQLQQSGPQLVSPGASVKISCKASGYSFTSYWMYWVKQRPGQGLEWIGMIDPSDSETRLNQKFKDKATLTVDKSSSTAYMQLSSPTSEDSAVYYCARTRNYWGQGTTLTVSS

SEQ ID NO: 409 - protein, 113 aa, synthetic construct
QVQLQQSGPQLVSPGASVKISCKASGYSFTSYWMYWVKQRPGQGLEWIGMIDPSDSETRLNQKFKDKATLTVDKSSSTAYMQLSSPTSEDSAVYYCARTRNYWGQGTSLTVSS

SEQ ID NO: 410 - protein, 120 aa, synthetic construct; identical to SEQ ID NO: 336

SEQ ID NO: 411 - protein, 120 aa, synthetic construct; identical to SEQ ID NO: 337

SEQ ID NO: 412 - protein, 120 aa, synthetic construct; identical to SEQ ID NO: 338

SEQ ID NO: 413 - protein, 122 aa, synthetic construct
QVQLQQSGAELVKPGASVKLSCKASGYTFSNYYVYWVKQRPGQGLEWIGEINPSNGDTNFNEKFKSKATLTVDKSSSTAYMQLSSLTSEDSAVYFCTSYYTHEAYYYAMDCWGQGTSVTVSS

SEQ ID NO: 414 - protein, 118 aa, synthetic construct
QVQLQQSGAELVRPGASVKLSCTASGFNIKDYYMHWVKQRPEQGLEWIGRIDPEDGDTEYAPKFQGKATMTADTSSNTAYLQLSSLTSEDTAVYYCTPYSIYDAMDYWGQGTSVTVSS

SEQ ID NO: 415 - protein, 119 aa, synthetic construct; identical to SEQ ID NO: 339

SEQ ID NO: 416 - protein, 123 aa, synthetic construct
QVQLQQSGAELVRPGVSVKISCKGSGYSFTDYGMHWVKQSHAKSLEWIGVISTYYGDASYNQKFKGKATMTVDKSSSTAYMELARLTSEDSAIYYCARQMDYDYTYYYAMDYWGQGTSVTVSS

SEQ ID NO: 417 - protein, 117 aa, synthetic construct
QVQLQQSGPELVKPGASVKMSCKASGYTFTDYVISWVKQRTGQGLEWNGEIYPGSGSTYYNEKFKGKATLTADKSSNTAYMQLSSLTSEDSAVYFCARMDGPWFAYWGQGTLVTVSA

SEQ ID NO: 418 - protein, 120 aa, synthetic construct
QVTLKVSGPGILQPSQTLGLACTFSGISLSTSGMGLSWLRQPSGKALEWLASIWNNDNYYNPSLKSRLTISKETSNNQVFLKLTSVDTADSTTYYCAWRPYYRYDSFAYWGQGTLVTVSA

SEQ ID NO: 419 - protein, 118 aa, synthetic construct; identical to SEQ ID NO: 342

SEQ ID NO: 420 - protein, 119 aa, synthetic construct
QVQLQQPGAELVMPGASVKLSCKASGYTFTSYWMHWVKQRPGQGLEWIGEIDPSDSYTNYNQKFKGKSTLTVDKSSSTAYMQLSSLTSEDSAVYYCARAGRYGSSFDYWGQGTTLTVSS

SEQ ID NO: 421 - protein, 122 aa, synthetic construct
QVTLKESGPGILQPSQTLSLTCSFSGFSLSTSGMGVSWIRQPSGKGLEWLAHIYWDDDKRYNPSLKSRLTISKDTSRNQGFLKITSVDTADTATYYCAGRPDDYDGAWFPYWGQGTLVTVSA

SEQ ID NO: 422 - protein, 117 aa, synthetic construct; identical to SEQ ID NO: 344

SEQ ID NO: 423 - protein, 117 aa, synthetic construct
QVQLQQPGAELVKPGASVKLSCKASGYTFTSYWMHWVKQRPGQGLEWIGMIHPNSGSTNYNEKFKSKATLTVDKSSSTAYMQLSSLTSEDSAVYYCARYDGYWFDYWGQGTTLTVSS

SEQ ID NO: 424 - protein, 119 aa, synthetic construct; identical to SEQ ID NO: 345

SEQ ID NO: 425 - protein, 124 aa, synthetic construct
QVQLQQPGAELVKPGASVKLSCKASGYTFTSYWMHWVKQRPGQGLEWIGMIHPNSGSTNYNEKFKSKATLTVDKSSSTAYMQLSSLTSEDSAVYYCAPETGDYGSSYVWYFDVWGTGTTVTVSS

SEQ ID NO: 426 - protein, 117 aa, synthetic construct
QVQLQQSGPELVKPGASVKMSCKASGYTFTDYVISWVKQRTGQGLEWIGEIYPGSGSTYYNEKFKGKATLTADKSSNTAYMQLSSLTSEDSAVYFCARGKVTRFAYWGQGTLVTVSA

SEQ ID NO: 427 - protein, 120 aa, synthetic construct
EVQLVESGGGLVKPGGSLKLSCAASGFTFSSYAMSWVRQTPEKRLEWVATISDGGSYTYYPDNVKGRFTISRDNAKNNLYLQMSHLKSEDTAMYYCARDQDSNWEYFDYWGQGTSLTVSS

SEQ ID NO: 428 - protein, 118 aa, synthetic construct
QIQLVQSGPELKKPGETVKISCKASGYTFTDYSMHWVRQAPGKGLKWMAWINTETGEPTYADDFKGRFAFSLETSASTAYLQINNLKNEDTATYFCARESWDRAMDYWGQGTSVTVSS

SEQ ID NO: 429 - protein, 116 aa, synthetic construct; identical to SEQ ID NO: 347

SEQ ID NO: 430 - protein, 120 aa, synthetic construct; identical to SEQ ID NO: 348

SEQ ID NO: 431 - protein, 119 aa, synthetic construct; identical to SEQ ID NO: 349

SEQ ID NO: 432 - protein, 122 aa, synthetic construct
QVQLQQPGAELVKPGASVKMSCKASGYTFTSYNMHWVKQTPGQGLEWIGALYSGNGDTSYNQKFKGKATLTADKSSSTAYMQLSSLTSEDSAVYYCARDYYGSSHLWYFDVWGAGTTVTVSS

SEQ ID NO: 433 - protein, 122 aa, synthetic construct
QVTLKESGPGILQPSQTLSLTCSFSGFSLSTSGMGVSWIRQPSGKGLEWLAHIYWDDDKRYNPSLKSRLTISKDTSRNQVFLKITSVDTADTATYYCARRAHYDYGWYFDVWGAGTTVTVSS

SEQ ID NO: 434 - protein, 118 aa, synthetic construct
QVQLQQPGAELVKPGASVKLSCKASGYTFTSYWMHWVKQRPGQGLEWIGMIHPNSGSTNYNEKFKSKATLTVDKSSSTAYMQLSSLTSEDSAVYYCAGYDYDWYFDVWGTGTTVTVSS

SEQ ID NO: 435 - protein, 120 aa, synthetic construct
QVKLVESGGDLVKPGGSLKLSCAASGFTFSSYGMSWVRQTPDKRLEWVATISSGGSYTYYPDSVKGRFTISRDNAKNTLYLQMSSLKSEDTAMYYCARHEDSNYHYFDYWGQGTTLTVFS

SEQ ID NO: 436 - protein, 120 aa, synthetic construct; identical to SEQ ID NO: 351

SEQ ID NO: 437 - protein, 120 aa, synthetic construct; identical to SEQ ID NO: 352

SEQ ID NO: 438 - protein, 120 aa, synthetic construct; identical to SEQ ID NO: 353

SEQ ID NO: 439 - protein, 118 aa, synthetic construct; identical to SEQ ID NO: 354

SEQ ID NO: 440 - protein, 118 aa, synthetic construct; identical to SEQ ID NO: 358

SEQ ID NO: 441 - protein, 120 aa, synthetic construct; identical to SEQ ID NO: 359

SEQ ID NO: 442 - protein, 114 aa, synthetic construct
QVQLQQSGPELVKPGASVKMSCKASGYTFTDYVISWVKQRTGQGLEWIGEIYPGSGSAYYNEKFKGKATLTADKSSNTAYMQLSSLTSEDSAVYFCARRGFDYWGQGTTLTVSS

SEQ ID NO: 443 - protein, 122 aa, synthetic construct
QVQLQQPGAELVKPGASVKLSCKASGYTFTSYWMHWVKQRPGQGLEWIGMIHPNSGSTNYNEKFKSKATLTVDKSSSTAYMQLSSLTSEDSAVYYCARDYYGSGYGYYFDYWGQGTTLTVSS

SEQ ID NO: 444 - protein, 122 aa, synthetic construct
QVQLQQPGAELVKPGASVKLSCKASGYTFTSYWMHWVKQRPGQGLEWIGMIHPNSGSTNYNEKFKSKATLTVDKSSSTAYMQLSSLTSEDSAVYYCARDYYGSSYGWYFDVWGTGTTVTVSS

SEQ ID NO: 445 - protein, 122 aa, synthetic construct; identical to SEQ ID NO: 444

SEQ ID NO: 446 - protein, 122 aa, synthetic construct
QVQLQQPGAELVKPGASVKLSCKASGYTFTSYWMHWVKQRPGQGLEWIGMIHPNSGSTNYNEKFKSKATLTVDKSSSTAYMQLSSLTSEDSAVYYCASDYYGSSYGWYFDVWGTGTTVTVSS

SEQ ID NO: 447 - protein, 122 aa, synthetic construct; identical to SEQ ID NO: 444

SEQ ID NO: 448 - protein, 122 aa, synthetic construct
QVQLQQPGAELVKPGASVKLSCKASGYTFTSYWMHWVKQRPGQGLEWIGMIHPNSGSTNYNEKFKSKATLTVDKSSSTAYMQLSSLTSEDSAVYYCTRDYYGSGYGWYFDVWGTGTTVTVSS

SEQ ID NO: 449 - protein, 118 aa, synthetic construct; identical to SEQ ID NO: 395

SEQ ID NO: 450 - protein, 118 aa, synthetic construct
QVQLQQPGAELVRPGASVKLSCKASGYTFTNYWMNWVKQRPGQGLEWIGMIDPSDSETHFNQMFKDKATLTVDKSSSTAYMQLSSLTSEDSAVYYCATYDVYYRFAYWGQGTLVTVSA

SEQ ID NO: 451 - protein, 120 aa, synthetic construct; identical to SEQ ID NO: 293

SEQ ID NO: 452 - protein, 120 aa, synthetic construct; identical to SEQ ID NO: 293

SEQ ID NO: 453 - protein, 120 aa, synthetic construct
EVKLVESGGDLVKPGGSLKLSCAASGFTFSSYGMSWVRQTPDKRLEWVATISSGGSYTYYPDSVKGRFTISRDNAKNTLYLQMSSLKSEDTAMYYCASQLTGTWYYFDYWGQGTTLTVSS

SEQ ID NO: 454 - protein, 120 aa, synthetic construct
QVKLVESGGDLVKPGGSLKLSCAASGFTFSSYGMSWVRQTPDKRLEWVATISSGGSYTYYPDSVKGRFTISRDNAKNTLYLQMSSLKSEDTAMYYCASQLTGTWYYFDYWGQGTTLTVSS

SEQ ID NO: 455 - protein, 120 aa, synthetic construct; identical to SEQ ID NO: 454

SEQ ID NO: 456 - protein, 119 aa, synthetic construct
DVKLVESGGGLVKLGGSLKLSCAASGFTFSNYYMSWVRQTPEKRLELVAVINSNGGSTYYPDTVKGRFTISRDNAKNTLYLQMSSLKSEDTALYYCARQEGIGYAMDYWGQGTSVTVSS

SEQ ID NO: 457 - protein, 116 aa, synthetic construct
EVQLQQSGPELVKPGASVKISCKTSGYTFTEYTMHWVKQSHGKSLEWIGGIYPNNGGTSYNQKFKGKATLTVDKSSSTAYMELRSLTSEDSAVYYCARGGWLLGYWGQGTTLTVSS

SEQ ID NO: 458 - protein, 118 aa, synthetic construct
QVQLKQSGPGLVQPSQSLSITCTVSGFSLTSYGVHWVRQSPGKGLEWLGVIWSGGSTDYNAAFISRLSISKDNSKSQVFFKMNSLQADDTAIYYCARDGGIRGAMDYWGQGTSVTVSS

SEQ ID NO: 459 - protein, 120 aa, synthetic construct; identical to SEQ ID NO: 369

SEQ ID NO: 460 - protein, 117 aa, synthetic construct
QVQLQQSGAELVRPGASVTLSCKASGYTFTDYEMHWVKQTPVHGLEWIGAIDPETGGTAYNQKFKGKATLTADKSSSTAYMELRSLTSEDSAVYYCTRNYDYAMDYWGQGTSVTVSS

SEQ ID NO: 461 - protein, 119 aa, synthetic construct
DVKLVESGGGLVKLGGSLKLSCAASGFTFSSYYMSWVRQTPEKRLELVAVINSNGGSTFYPDTVKGRFTISRDNAKNTLYLQMSSLKSEDTALYYCARQEGIGYALDYWGQGTSVTVSS

SEQ ID NO: 462 - protein, 122 aa, synthetic construct
EVKLVESGGDLVKPGGSLKLSCAASGFTFSSYAMSWVRQTPEKRLEWVAAISSGGSTYYPDSVKGRFTISRDNARNILYLQMSSLRSEDTAMYYCAREREWGVYYGSSLDYWGQGTTLTVSS

SEQ ID NO: 463 - protein, 115 aa, synthetic construct
EVQLQQSGAELVKPGASVKLSCTASGFNIKDTYMHWVKQRPEQGLEWIGRIDPANGNTKYDPKFQGKATITADTSSNTAYLQLSSLTSEDTAVYYCARSDGNYDWGQGTLVTVSA

SEQ ID NO: 464 - protein, 119 aa, synthetic construct
DVKLVESGGGLVKLGGSLKLSCAASGFTFSNYYMSWVRQTPEKRLELVAVINSNGGSTYYPDTVKGRFTISRDNAKNILYLQMSSLKSEDTALYYCARQEGIGYGMDYWGQGTSVTVSS

SEQ ID NO: 465 - protein, 120 aa, synthetic construct
EVQLVESGGGLVQPKGSLKLSCAASGFTFNTYVMNWVRQAPGKGLEWVARIRSKSDNYATYYADSVKDIFTISRDDSQSMLYLQMNNLKTEDTAMYYCVRHDGVVGFDVWGAGTTVTVSS

SEQ ID NO: 466 - protein, 114 aa, synthetic construct
DVQLQESGPGLVKPSQSLSLTCSVTGYSITSGYYWNWIRQFPGNKLEWMGYISYDGSNNYNPSLKNRISITRDTSKNQFFLKLNSVTTEDTATYYCARGGGRGWGQGTLVTVSA

SEQ ID NO: 467 - protein, 120 aa, synthetic construct
QIQLVQSGPELKKPGETVKISCKASGYTFTDYSMHWVKQAPGKGLKWMGWINTETGEPTYADDFKGRFAFSLETSASTAYLQINNLKNEDTATYFCARDYYDYYYAMDYWGQGTSVTVSS

SEQ ID NO: 468 - protein, 118 aa, synthetic construct
QIQLVQSGPELKKPGETVKISCKASGYTFTDYSMHWVKQAPGKGLKWMGWINTETGEPTYADDFKGRFAFSLETSASTAYLQINNLKNEDTATYFCARESWDRAMDYWGQGTSVTVSS

SEQ ID NO: 469 - protein, 121 aa, synthetic construct
QVQLQQPGAELVRPGASVKLSCKASGYTFTNYWMNWVKQRPEQGLEWIGRIDPYDSETHYNQKFKDKAILTVDKSSSTAYMQLSSLTSEDSAVYYCARIYSDYDGAWFAYWGQGTLVTVSA

SEQ ID NO: 470 - protein, 116 aa, synthetic construct
EVQLQQSGPELVKPGASVKMSCKASGYTFTDYYMDWVKQSHGESFEWIGRVNPYNGGTSYNQKFKGKATLTVDKSSSTAYMELNSLTSEDSAVYYCARGTVGFAYWGQGTLVTVSA

SEQ ID NO: 471 - protein, 122 aa, synthetic construct
EVKLVESGGGLVKPGGSLKLSCAASGFTFSSYAMSWVRQTPEKRLEWVASISSGGSTYYPDSVKGRFTISRDNARNILSLQMSSLRSEDTAMYYCAREREWGVFYGSSLDYWGQGTTLTVSS

SEQ ID NO: 472 - protein, 120 aa, synthetic construct
EVMLVESGGGLVKPGGSLKLSCAASGFTFSSYAMSWIRQTPEKRLEWVATISSGGSYTYYPDSVKGRFTISRDNAKNTLYLQMSSLRSEDTAMYYCARHDDSSYGYFDYWGQGTTLTVSS

SEQ ID NO: 473 - protein, 113 aa, synthetic construct
EVKLVESGGGLVKPGGSLKLSCAASGFTFSNYAMSWVRQTPEKRLEWVASISSGGTTYYPDSVKGRFTISRDNARNILYLQMSSLRSEDTAMYYCARTMPDVWGAGTTVTVSS

SEQ ID NO: 474 - protein, 119 aa, synthetic construct
QVQLKESGPGLVAPSQSLSITCTVSGFSLTSYGVHWVRQPPGKGLEWLGVIWAGGSTNYNSALMSRLSISKDNSKSQVFLKMNSLQTDDTAMYYCARDTDGYYWAMDYWGQGTSVTVSS

SEQ ID NO: 475 - protein, 114 aa, synthetic construct
DVQLQESGPGLVKPSQSLSLTCTVTGYSITSDHAWNWIRQFPGNKLEWMGYISYSGSTTYNPSLKSRISITRDTSKNQFFLQLNSVTTEDTATYYCARKWGDYWGQGTSVTVSS

SEQ ID NO: 476 - protein, 117 aa, synthetic construct
QVQLQQSGAELVRPGASVTLSCKASGYTFTDYEMHWVKQTPVHGLEWIGAIDPETGGTAYNQKFKGKATLTADKSSSTAYMELRSLTSEDSAVYYCTRNYDYALDYWGQGTSVTVSS

SEQ ID NO: 477 - protein, 114 aa, synthetic construct
DVQLQESGPGLVKPSQSLSLTCSVTGYSITSGYYWNWIRQFPGNKLEWMGYISYDGSNDYNPSLKNRISITRDTSKNQFFLKLNSVTTEDTATYYCARGGGRGWGQGTLVTVSA

SEQ ID NO: 478 - protein, 119 aa, synthetic construct
DVKLVESGGGLVKLGGSLKLSCAASGFTFSNYYMSWVRQTPEKRLELVAVINSNGGSTYYPDTVKGRFTISRDNAKNTLYLQMSSLKSEDTALYYCARQEEIGYAMDYWGQGTSVTVSS

SEQ ID NO: 479 - protein, 117 aa, synthetic construct
EVQLQQSGAELVRPGALVKLSCKASGFNIKDYFMHWVKQRPEQGLEWIGWIDPETDNTIYDPKFQGKASITADTSSNTAYLQLSSLTSEDTAVYYCARSGNMGFTYWGQGTLVTVSA

SEQ ID NO: 480 - protein, 120 aa, synthetic construct
EVMLVESGGGLVKPGGSLKLSCAASGFTFSSYAMSWVRQTPEKRLEWVATISSGGSYTYYPDSVKGRFTISRDNAKNTLYLQMSSLRSEDTAMYYCASQGGSSWGAMDYWGQGTSVTVSS

SEQ ID NO: 481 - protein, 118 aa, synthetic construct
EVMLVESGGGLVKPGGSLKLSCAASGFTFSSYAMSWVRQTPEKRLEWVATISNGGSYTYYPDSVKGRFTISRDNAKNTLYLQMSSLRSEDTAMYYCARHEITTRFAYWGQGTLVTVSA

SEQ ID NO: 482 - protein, 115 aa, synthetic construct
VQLQESGPGLVKPSQSLSLTCSVTGYSITSGYYWNWIRQFPGNKLEWMGYMSYDGSNNYNPSLKNRISITRDTSKNQFFLKLNSVTTEDTATYYCAREAGYFDYWGQGTTLTVSS

SEQ ID NO: 483 - protein, 119 aa, synthetic construct
EVQLVESGGGLVQPKGSLKLSCAASGFSFNTYAMNWVRQAPGKGLEWVARIRSKSNNYATYYADSVKDRFTISRDDSESMLYLQMNNLKTEDTAMYYCVRQYGYDFDYWGQGTTLTVSS

SEQ ID NO: 484 - protein, 120 aa, synthetic construct
EVQLVESGGDLVKPGGSLKLSCAASGFTFSSYGMSWVRQTPDKRLEWVATISSGGSYTYYPDSVKGRFTISRDNAKNTLYLQMSSLKSEDTAMYYCARHKGVNWDYFDYWGQGTTLTVSS

SEQ ID NO: 485 - protein, 121 aa, synthetic construct
QVQLQQSGAELVRPGASVTLSCKASGYTFTDYEMHWVKQTPVHGLEWIGAIDPETGGTAYNQKFKGKATLTADKSSSTAYMELRSLTSEDSAVYYCTRGDGNYDSWYFDVWGAGTTVTVSS

SEQ ID NO: 486 - protein, 119 aa, synthetic construct
EVMLVESGGGLVKPGGSLKLSCAASGFTFSSYAMSWVRQTPEKRLEWVATISSGGSYTYYPDSVKGRFTISRDNAKNTLYLQMSSLRSEDTAMYYCARLPVTTVVFDYWGQGTTLTVSS

SEQ ID NO: 487 - protein, 118 aa, synthetic construct
EVQLVESGGGLVKPGGSLKLSCAASGFTFSSYAMSWVRQTPEKRLEWVATISSGGSYTYYPDSVKGRFTISRDNAKNTLYLQMSSLRSEDTAMYYCARRPVVVPFDYWGQGTTLTVSS

SEQ ID NO: 488 - protein, 117 aa, synthetic construct
QVQLKQSGPGLVQPSQSLSITCTVSGFSLTSYGVHWVRQSPGKGLEWLGVIWSGGSTDYNAAFISRLSISKDNSKSQVFFKMNSLQADDTAIYYCARGWDADYFDYWGQGTTLTVSS

SEQ ID NO: 489 - protein, 115 aa, synthetic construct
QVQLQQPGAELVKPGASVKLSCKASGYTFTNYWMHWVKQRPGQGLEWIGMIHPNSGSTNYNEKFKSKATLTVDKSSSTAYMQLSSLTSEDSAVYYCTRYDYDDYWGQGTTLTVSS

SEQ ID NO: 490 - protein, 119 aa, synthetic construct
EVQLQQSGPELVKPGASVKISCKASGYTFTDYYMNWVKQSHGKSLEWIGDINPNNGGTSYNQKFKGKATLTVDKSSSTAYMDLRSLTSEDSAVYYCARSELGLYAMDYWGQGTSVTVSS

SEQ ID NO: 491 - protein, 117 aa, synthetic construct
QVQLQQSGAELMKPGASVKLSCKATGYTFTGYWIEWVKQRPGHGLEWIGEILPGSGSTNYNEKFKGKATFTADTSSNTAYMQLSSLTTEDSAIYYCARGRIHYFDYWGQGTTLTVSS

SEQ ID NO: 492 - protein, 117 aa, synthetic construct; identical to SEQ ID NO: 491

SEQ ID NO: 493 - protein, 119 aa, synthetic construct
QVQLKQSGPGLVQPSQSLSITCTVSGFSLTSYGVHWVRQSPGKGLEWLGVIWSGGSTDYNAAFISRLSISKDNSKSQVFFKMNSLQADDTAIYYCARKGYGYDWYFDVWGTGTTVTVSS

SEQ ID NO: 494 - protein, 119 aa, synthetic construct
QVQLQQPGAELVMPGASVKLSCKASGYTFTSYWMHWVKQRPGQGLEWIGEIDPSDSYTNYNQKFKGKATLTVDKSSSTAYMQLSSLTSEDSAVYYCARSSYYYYAMDYWGQGTSVTVSS

SEQ ID NO: 495 - protein, 114 aa, synthetic construct
DVQLQESGPGLVKPSQSLSLTCSVTGYSITSGYYWNWIRQFPGNKLEWMGYISYDGSNNYNPSLKNRISITRDTSKNQFFLKLNSVTTEDTATYYCARGGGRDWGQGTTLTVSS

SEQ ID NO: 496 - protein, 119 aa, synthetic construct
QVQLKQSGPGLVQPSQSLSITCTVSGFSLTSYGVHWVRQSPGKGLEWLGVIWSGGSTDYNAAFISRLSISKDNSKSQVFFKMNSLQADDTAIYYCARGGDYDSYAMDYWGQGTSVTVSS

SEQ ID NO: 497 - protein, 122 aa, synthetic construct
QVQLQQPGAELVKPGASVKMSCKASGYTFTSYWITWVKQRPGQGLEWIGDIYPGSGSTNYNEKFKSKATLTVDTSSSTAYMQLSSLTSEDSAVYYCARESVYDGYSWYFDVWGTGTTVTVSS

SEQ ID NO: 498 - protein, 120 aa, synthetic construct
EFQLQQSGPELVKPGASVKISCKASGYSFTDYNMNWVKQSNGKSLEWIGVINPNYGTTSYNQKFKGKATLTVDQSSSTAYMQLNSLTSEDSAVYYCASTYDYDDWYFDVWGTGTTVTVSS

SEQ ID NO: 499 - protein, 119 aa, synthetic construct
QVQLQQPGAELVMPGASVKLSCKASGYTFTSYWMHWVKQRPGQGLEWIGEIDPSDSYTNYNQKFKGKATLTVDKSSSTAYMQLSSLTSEDSAVYYCARSGNYLYAMDYWGQGTSVTVSS

SEQ ID NO: 500 - protein, 118 aa, synthetic construct
EFQLQQSGPELVKPGASVKISCKASGYSFTDYNMNWVKQSNGKSLEWIGVINPNYGTTSYNQKFKGKATLTVDQSSSTAYMQLNSLTSEDSAVYYCAREGTSWYFDVWGTGTTVTVSS

SEQ ID NO: 501 - protein, 119 aa, synthetic construct
QVQLKQSGPGLVQPSQSLSITCTVSGFSLTSYGVHWVRQSPGKGLEWLGVIWRGGSTDYNAAFMSRLSITKDNSKSQVFFKMNSLQADDTAIYYCAKKGDGYDWYFDVWGTGTTVTVSS

SEQ ID NO: 502 - protein, 121 aa, synthetic construct
QVQLKQSGPGLVQPSQSLSITCTVSGFSLTSYGVHWVRQSPGKGLEWLGVIWSGGSTDYNAAFISRLSISKDNSKSQVFFKMNSLQADDTAIYYCAREGNYGSSYDAMDYWGQGTSVTVSS

SEQ ID NO: 503 - protein, 119 aa, synthetic construct
QVQLQQPGAELVMPGASVKLSCKASGYTFTSYWMHWVKQRPGQGLEWIGEIDPSDSYTNYNQKFKGKATLTVDKSSSTAYMQLSSLTSEDSAVYYCARSSNYPYAMDYWGQGTSVTVSS

SEQ ID NO: 504 - protein, 114 aa, synthetic construct
EVQLQQSVAELVRPGASVKLSCTASGFNIKNTYMHWVKQRPEQGLEWIGRIDPANGNTKYAPKFQGKATITADTSSNTAYLQLSSLTSEDTAIYYCAYYSGLYWGQGTLVTVSA

SEQ ID NO: 505 - protein, 122 aa, synthetic construct
QVQLQQPGAELVRPGSSVKLSCKASGYTFTSYWMHWVKQRPIQGLEWIGNIDPSDSETHYNQKFKDKATLTVDKSSSTAYMQLSSLTSEDSAVYYCARRGQIYYGYSWFAYWGQGTLVTVSA

SEQ ID NO: 506 - protein, 120 aa, synthetic construct
EVQLQQSGPELVKPGASVKISCKASGYTFTDYYMNWVKQSHGKSLEWIGDINPNNGGTSYNQKFKGKATLTVDKSSSTAYMELRSLTSEDSAVYYCARSTVVADWYFDVWGTGTTVTVSS

SEQ ID NO: 507 - protein, 119 aa, synthetic construct
QVQLQQSGAELARPGASVKLSCKASGYTFTSYGISWVKQRTGQGLEWIGEIYPRSGNTYYNEKFKGKATLTADKSSSTAYMELRSLTSEDSAVYFCARSGSSYGYFDVWGTGTTVTVSS

SEQ ID NO: 508 - protein, 119 aa, synthetic construct
QVQLKQSGPGLVQPSQSLSITCTVSGFSLTSYGVHWVRQSPGKGLEWLGVIWSGGSTDYNAAFISRLSISKDNSKSQVFFKMNSLQADDTAIYYCARKGGYDAYAMDYWGQGTSVTVSS

SEQ ID NO: 509 - protein, 121 aa, synthetic construct
EFQLQQSGPELVKPGASVKISCKASGYSFTDYNMNWVKQSNGKSLEWIGVINPNYGTTSYNQKFKGKATLTVDQSSSTAYMQLNSLTSEDSAVYYCAREGFITTVVAVDYWGQGTTLTVSS

SEQ ID NO: 510 - protein, 118 aa, synthetic construct
QVQLQQSGAELVRPGASVTLSCKASGYTFTDYEMHWVKQTPVHGLEWIGAIDPETGGTAYNQKFKGKAILTADKSSSTAYMELRSLTSEDSAVYYCTREGNYDAMDYWGQGTSVTVSS

SEQ ID NO: 511 - protein, 117 aa, synthetic construct
QVQLQQPGAELVRPGTSVKLSCKASGYTFTSYWMHWVKQRPGQGLEWIGVIDPSDSYTNYNQKFKGKATLTVDTSSSTAYMQLSSLTSEDSAVYYCARWDYYGVDYWGQGTTLTVSS

SEQ ID NO: 512 - protein, 107 aa, synthetic construct
DIKMTQSPSSMYASLGERVTITCKASQDINSYLSWFQQKPGKSPKTLIYRANRLVDGVPSRFSGSGSGQDYSLTISSLEYEDMGIYYCLQYDEFPPTFGAGTKLELK

SEQ ID NO: 513 - protein, 107 aa, synthetic construct; identical to SEQ ID NO: 512

SEQ ID NO: 514 - protein, 107 aa, synthetic construct
DIQMTQSPASLSVSVGETVTITCRASENIYSNLAWYQQKQGKSPQLLVFAATYLADGVPSRFSGSGSGTQYSLKINSLQSEDFGNYYCQHFWGTPWTFGGGTKLEIK

SEQ ID NO: 515 - protein, 107 aa, synthetic construct
DIQMTQSPASLSVSVGETVTITCRASENIYSNLAWYQQKQGKSPQLLVYAATNLADGVPSRFSGSGSGTQYSLKINSLQSEDFGSYYCQHFWGTPWTFGGGTKLEIK

SEQ ID NO: 516 - protein, 107 aa, synthetic construct
DIQMTQSPASLSVSVGETVTITCRASENIYSNLAWYQQKQGKSPQVLVYAATNLADGVPSRFSGSGSGTQYSLKINSLQSEDFGSYYCQHFWGSPWTFGGGTKLEIK

SEQ ID NO: 517 - protein, 107 aa, synthetic construct
DIQMTQSPASLSVSVGETVTITCRASENIYSNLAWYQQKQGKSPRLLVYAATNLADGVPSRFSGSGSGTQYSLKITSLQSEDFGSYYCQHFWGTPWTFGGGTKLEIK

SEQ ID NO: 518 - protein, 107 aa, synthetic construct; identical to SEQ ID NO: 515

SEQ ID NO: 519 - protein, 107 aa, synthetic construct
DIQMTQSPASLSVSVGETVTITCRASENIYSNLAWYQQKQGKSPQVLVYAATNVADGVPSRFSGSGSGTQYSLKINSLQSEDFGSYYCQHFWGTPWTFGGGTKLEIK

SEQ ID NO: 520 - protein, 107 aa, synthetic construct
DIQMTQSPASLSVSVGETVTITCRASDNIYSNLAWYQQKQGKSPQLLVYAATNLADGVPSRFSGSGSGTQYSLKINSLQSEDFGSYYCQHFWGTPWTFGGGTKLEIK

SEQ ID NO: 521 - protein, 107 aa, synthetic construct
DIQMTQSPASLSVSVGETVTITCRASENIYSNLAWYQQKQGKSPRLLVYAATNLADGVPSRFSGSGSGTQYSLKINSLQSEDFGSYYCQHFWGTPWTFGGGTKLEIK

SEQ ID NO: 522 - protein, 107 aa, synthetic construct; identical to SEQ ID NO: 515

SEQ ID NO: 523 - protein, 107 aa, synthetic construct
DIQMTQSPASLSVSVGETVTITCRASENIYSNLAWYQQKQGKSPQLLVFAATYLADGVPSRFSGSGSGTQYSLKINSLQSEDFGSYYCQHFWGTPWTFGGGTKLEIK

SEQ ID NO: 524 - protein, 107 aa, synthetic construct
DIQMTQSPASLSVSVGETVTITCRASENIYSNLAWYQQKQGKSPQLLVYAATNLADGVPSRFSGSGSGTQYSLKINSLQSEDFGSYYCQHFWGSPWTFGGGTKLEIK

SEQ ID NO: 525 - protein, 107 aa, synthetic construct
QIVLTQSPAIMSASPGEKVTMTCSASSSVSYMHWFQQKSGTSPKRWIYDTSKLASGVPARFSGSGSGTSYSLTFSSMEAEDAATYYCQQWSSNPLYTFGGGTKLEIK

SEQ ID NO: 526 - protein, 111 aa, synthetic construct
DIVLTQSPASLAVSLGQRATISCKASQSVDYDGDSYMNWYQQKPGQPPKLLIYAASNLESGIPARFSGSGSGTDFTLNIHPVEEEDAATYYCQQSNEDPLTFGGGTKLELK

SEQ ID NO: 527 - protein, 107 aa, synthetic construct
EIQMTQSPSSMSASLGDRITITCQATQDIVKNLNWYQQKPGKPPSFLIYYATELAEGVPSRFSGSGSGSDYSLTINNLESEDFADYYCLQFYEFPLTFGAGTKLELK

SEQ ID NO: 528 - protein, 107 aa, synthetic construct; identical to SEQ ID NO: 515

SEQ ID NO: 529 - protein, 113 aa, synthetic construct
DIVMTQSPSSLAMSVGQKVTMSCKSSQSLLNSSNQKNYLAWYQQKPGQSPKLLVYFASTRESGVPDRFIGSGSGTDFTLTISSVQAEDLADYFCQQHYSTPLTFGAGTKLELK

SEQ ID NO: 530 - protein, 106 aa, synthetic construct
QIVLTQSPAIMSASPGEKVTITCSASSSVSYMHWFQQKPGTSPKLWIYSTSNLASGVPARFSGSGSGTSYSLTISRMEAEDAATYYCQQRSSFPYTFGGGTKLEIK

SEQ ID NO: 531 - protein, 107 aa, synthetic construct
SIVMTQTPKFLLVSAGDRVTITCKASQSVSNDVAWYQQKPGQSPKLLIYYASNRYTGVPDRFTGSGYGTDFTFTISTVQAEDLAVYFCQQDYTSLPTFGAGTKLEIK

SEQ ID NO: 532 - protein, 107 aa, synthetic construct
DIQMTQSPSSLSASLGDTITITCHASQNINVWLSWYQQKPGNIPKLLIYKASNLHTGVPSRFSGSGSGTGFTLTISSLQPEDIATYYCQQGQSYPLTFGGGTNLEIK

SEQ ID NO: 533 - protein, 107 aa, synthetic construct
ETTVTQSPASLSMAIGEKVTIRCITSTDIDDDMNWYQQKPGEPPKLLISEGNSLRPGVPSRFSSSGYGTDFVFTIENMLSEDVADYYCLQSDNLPLTFGAGTKLELK

SEQ ID NO: 534 - protein, 107 aa, synthetic construct; identical to SEQ ID NO: 512

SEQ ID NO: 535 - protein, 107 aa, synthetic construct
DIQMTQSPSSLSASLGGKVTITCKASQDINKYIAWYQHKPGKGPSLLIHYTSTLQPGIPSRFSGSGSGRDYSFSISNLEPEDIATYYCLQYDNLMYTFGGGTKLEIK

SEQ ID NO: 536 - protein, 105 aa, synthetic construct
ENVLTQSPAIMSASLGEKVTMSCRASSSVNYMYWYQQKSDASPKLWIYYTSNLAPGVPGRFSGSGSGNSYSLTISSMEGEDAATYYCQQFTSSHTFGGGTKLEIK

SEQ ID NO: 537 - protein, 111 aa, synthetic construct
DIVLTQSPASLAVSLGQRATISCRASQSVSTSSYSYMHWYQQKPGQPPKLLIKYASNLESGVPARFSGSGSGTDFTLNIHPVEEEDTATYYCQHSWEIPLTFGAGTKLELK

SEQ ID NO: 538 - protein, 107 aa, synthetic construct
ETTVTQSPASLSVATGEKVSIRCMTSIDIDDDMNWYQQKPGEPPKLLISEGNTLRPGVPSRFSSSGYGTDFVFTIENTLSEDVADYYCLQSDNMPFTFGSGTKLEIK

SEQ ID NO: 539 - protein, 109 aa, synthetic construct
QAVVTQESALTTSPGGTVILTCRSSTGAVTTSNYANWVQEKPDHLFTGLIGGTSNRAPGVPVRFSGSLIGDKAALTITGAQTEDDAMYFCALWYSTHWVFGGGTKLTVL

SEQ ID NO: 540 - protein, 108 aa, synthetic construct
QAVVTQESALTTSPGETVTLTCRSSTGAVTTSNYANWVQEKPDHLFTGLIGGTNNRAPGVPARFSGSLIGDKAALTITGAQTEDEAIYFCALWYSNHLFGSGTKVTVL

SEQ ID NO: 541 - protein, 109 aa, synthetic construct
QAVVTQESALTTSPGETVTLTCRSSTGAVTTSNYANWVQEKPDHLFTGLIGGTNNRAPGVPARFSGSLIGDKAALTITGAQTEDEAIYFCALWYSNHWVFGGGTKLTVL

SEQ ID NO: 542 - protein, 107 aa, synthetic construct
EIQMTQSPSSMSASLGDRITITCQATQDIVKNLNWYQQKPGKPPSFLIYYATELAEGVPSRFSGSGSGSDYSLTISNLESEDFADYYCLQFYEFPYTFGGGTKLEIK

SEQ ID NO: 543 - protein, 106 aa, synthetic construct
QIVLTQSPAIMSASPGEKVTMTCSASSSVSYMYWYQQKPGSSPRLLIYDTSNLASGVPVRFSGSGSGTSYSLTISRMEAEDAATYYCQQWSSYPLTFGAGTKLELK

SEQ ID NO: 544 - protein, 107 aa, synthetic construct
ETTVTQSPASLSVATGEKVTIRCITSTDIDDDMNWYQQKPGEPPKLLISEGNTLRPGVPSRFFSGGYGTDFVFTIENTLSEDVADYYCLQSDNMPLMFGAGTKLELK

SEQ ID NO: 545 - protein, 105 aa, synthetic construct
QIVLTQSPAIMSASPGEKVTITCSASSSVSYMHWFQQRPGTSPKLWIYSTSNLASGVPARFSGSGSGTSYSLTISRMEAEDAATYYCQQRSTYPTFGGGTKLEIK

SEQ ID NO: 546 - protein, 107 aa, synthetic construct; identical to SEQ ID NO: 542

SEQ ID NO: 547 - protein, 107 aa, synthetic construct
DIQMTQSPASLSASVGETVTITCRASGNIHNYLAWYQQKQGKSPQLLVYNAKTLADGVPSRFSGSGSGTQYSLKINSLQPEDFGSYYCQHFWSTPWTFGGGTKLEIK

SEQ ID NO: 548 - protein, 107 aa, synthetic construct
DIQMTQSPASLSVSVGETVTITCRASENIYSNLAWYQQKQGKSPQLLVYAATNLADGVPSRFSGSGSGTQYSLKINSLQSEDFGSYYCQHFWGTPYTFGGGTKLEIK

SEQ ID NO: 549 - protein, 108 aa, synthetic construct
DIKMTQSPSSMYASLGERVTITCKASQDINSYLSWFQQKPGKSPKTLIYRANRLVDGVPSRFSGSGSGQDYSLTISSLEYEDMGIYYCLQYDEFPLTFGGGTKLEIKR

SEQ ID NO: 550 - protein, 108 aa, synthetic construct
DIKMTQSPSSMYASLGERVTITCKASQDINGYLSWYQQKPGKSPQTLLYRANRLVDGVPSRFRGSGSGQDYTLTISSLEYEDMGTYYCLQYDEFPPTFGGGTKLELKR

SEQ ID NO: 551 - protein, 108 aa, synthetic construct
DIKMTQSPSSMYASLGERVTITCKASQDINSYLSWYQQKPGKSPKTLIYRAKRLVDGVPSRFSGSGSGQDYTLTISSLEYEDMGTYYCLQYDEFPPTFGGGTKLELKR

SEQ ID NO: 552 - protein, 108 aa, synthetic construct
DIKMTQSPSSMYASLGERVTITCKASQDINGYLSWFQQKPGKSPQTLLYRANRLVDGVPSRFRGSGSGQDYSLTISSLEYEDMGIYYCLQYDEFPPTFGAGTKLELKR

SEQ ID NO: 553 - protein, 108 aa, synthetic construct
DIKMTQSPSSMYASLGERVTITCKASQDINSYLSWFQQKPGKSPKTLIYRAKRLVDGVPSRFSGSGSGQDYSLTISSLEYEDMGIYYCLQYDEFPPTFGAGTKLELKR

SEQ ID NO: 554 - protein, 108 aa, synthetic construct
DIKMTQSPSSMYASLGERVTITCKASQDINSYLSWFQQKPGKSPKTLIYRANRLVDGVPSRFSGSGSGQDYSLTISSLEYEDMGIYYCLHYDEFPPTFGAGTKLELKR

SEQ ID NO: 555 - protein, 108 aa, synthetic construct
DIKMTQSPSSMYASLGERVTITCKASQDINSYLSWFQQKPGKSPKTLIYRANRLVDGVPSRFSGSGSGQDYSLTISSLEYEDMGIYYCLQYDEFPPTFGAGTKLELKR

SEQ ID NO: 556 - protein, 108 aa, synthetic construct; identical to SEQ ID NO: 555

SEQ ID NO: 557 - protein, 108 aa, synthetic construct; identical to SEQ ID NO: 555

SEQ ID NO: 558 - protein, 108 aa, synthetic construct; identical to SEQ ID NO: 555

SEQ ID NO: 559 - protein, 108 aa, synthetic construct; identical to SEQ ID NO: 555

SEQ ID NO: 560 - protein, 108 aa, synthetic construct
DIKMTQSPSSMYASLGERVTITCKASQDINSYLSWFHQKPGKSPKTLIYRANRLVDGVPSRFSGSGSGQDYSLTISSLEYEDMGIYYCLQYDEFPPTFGAGTKLELKR

SEQ ID NO: 561 - protein, 108 aa, synthetic construct; identical to SEQ ID NO: 555

SEQ ID NO: 562 - protein, 108 aa, synthetic construct; identical to SEQ ID NO: 555

SEQ ID NO: 563 - protein, 108 aa, synthetic construct
DIKMTQSPSSMYASLGERVTITCKASQDINSYLSWFQQKPGKSPKTLIYRANRLVDGVPSRFSGSGSGQDYSLTISSLEYEDMGFYYCLQYDEFPPTFGAGTKLELKR

SEQ ID NO: 564 - protein, 108 aa, synthetic construct
DIKMTQSPSSIYASLGERVTITCKASQDINSYLNWFQQKPGKSPKTLIYRANRLVDGVPSRFSGSGSGQDYSLTISSLEYEDMGIYYCLQYDEFPPTFGVGTKLELKR

SEQ ID NO: 565 - protein, 108 aa, synthetic construct; identical to SEQ ID NO: 555

SEQ ID NO: 566 - protein, 108 aa, synthetic construct
DIKMTQSPSSMYASLGERVTITCKASQDINSYLSWFQQKPGKSPKTLIYRANRLVDGVPSRFSGSGSGQDYSLTISSLEYEDMGIYYCLQYDEFPPTFGCGTKLELKR

SEQ ID NO: 567 - protein, 108 aa, synthetic construct; identical to SEQ ID NO: 566

SEQ ID NO: 568 - protein, 108 aa, synthetic construct
DIQMTQSPASLSVSVGETVTITCRASDNIYSNLAWYQQKQGKSPQLLVYAATNLADGVPSRFSGSGSGTQYSLKINSLQSEDFGSYYCQHFWGTPWTFGGGTKLEIKR

SEQ ID NO: 569 - protein, 108 aa, synthetic construct
DIQMTQSPASLSVSVGETVTITCRASENIYSNLAWYQQKQGKSPQLLVFAATYLADGVPSRFSGSGSGTQYSLKINSLQSEDFGNYYCQHFWGTPWTFGGGTKLEIKR

SEQ ID NO: 570 - protein, 108 aa, synthetic construct
DIKMTQSPSSMYASLGERVTITCKASQDINSYLSWFQQKPGKSPKTLIYRANRLVDGVPSRFSGSGSGQDYSLTISSLEYEDMGIYYCLQYDEFPPTFGAGAKLELKR

SEQ ID NO: 571 - protein, 108 aa, synthetic construct
NIVMTQSPKSMSMSVGERVTLSCKASENVVTYVSWYQQKPEQSPKLLIYGASNRYTGVPDRFTGSGSATDFTLTISSVQAEDLADYHCGQSYSYPFTFGSGTKLEIKR

SEQ ID NO: 572 - protein, 108 aa, synthetic construct; identical to SEQ ID NO: 571

SEQ ID NO: 573 - protein, 108 aa, synthetic construct; identical to SEQ ID NO: 571

SEQ ID NO: 574 - protein, 108 aa, synthetic construct; identical to SEQ ID NO: 571

SEQ ID NO: 575 - protein, 108 aa, synthetic construct
QIVLTQSPAIMSASPGEKVTMTCSASSSVSYMHWYQQKSGTSPKRWIYDTSKLASGVPARFSGSGSGTSYSLTISSMEAEDAATYYCQQWSSNPLYTFGGGTKLEIKR

SEQ ID NO: 576 - protein, 108 aa, synthetic construct
QIVLTQSPAIMSASPGEKVTMTCSASSSVSYMHWFQQKSGTSPKRWIYDTSKLASGVPARFSGSGSGTSYSLTFSSMEAEDAATYYCQQWSSNPLYTFGGGTKLEIKR

SEQ ID NO: 577 - protein, 112 aa, synthetic construct
DIVLTQSPASLAVSLGQRATISCKASQSVDYDGDSYMNWYQQKPGQPPKLLIYAASNLESGIPARFSGSGSGTDFTLNIHPVEEEDAATYYCQQSNEDPLTFGAGTKLELKR

SEQ ID NO: 578 - protein, 112 aa, synthetic construct; identical to SEQ ID NO: 577

SEQ ID NO: 579 - protein, 112 aa, synthetic construct
DIVLTQSPASLAVSLGQRATISCKASQSVDYDGDSYMNWYQQKPGQPPQLLIYAASNLQSGIPARFSGSGSGTDFTLNIHPVEEEDAATYYCQQSNEDPLTFGAGTKLELKR

SEQ ID NO: 580 - protein, 112 aa, synthetic construct
DIVLTQSPASLAVSLGQRATISCKASQSVDYDGDSYMNWYQQKPGQPPKLLIYAASNLESGIPARFGGSGSGTDFTLNIHPVEEEDAATYYCQQSNEDPLTFGAGTKLELKR

SEQ ID NO: 581 - protein, 108 aa, synthetic construct
EIQMTQSPSSMSASLGDRITITCQATQDIVKNLNWYQQKPGKPPSFLIYYATELAEGVPSRFSGSGSGSDYSLTISNLESEDFADYYCLQFYEFPLTFGAGTKLELKR

SEQ ID NO: 582 - protein, 112 aa, synthetic construct
DIVLTQSPASLAVSLGQRATISCKASQSVDYDGDSYMNWYQQKPGQPPKLLIYAASNLESGIPARFSGSGSGTDFTLNIHPVEEEDAATYYCQQSNKDPLTFGAGTKLELKR

SEQ ID NO: 583 - protein, 112 aa, synthetic construct; identical to SEQ ID NO: 582

SEQ ID NO: 584 - protein, 112 aa, synthetic construct; identical to SEQ ID NO: 577

SEQ ID NO: 585 - protein, 112 aa, synthetic construct
DIVLTQSPASLAVSLGQRATISCKASQSVDYDGDSYMNWYQQKPGQPPKLLIYAASNLESGIPARFSGSGSGTDFTLNIHPVEEEDAATYYCQQSNKDPFTFGAGTKLELKR

SEQ ID NO: 586 - protein, 112 aa, synthetic construct
DIVLTQSPSSLAVSLGQRATISCKASQSVDYDGDSYMNWYQQKPGQPPKLLIYAASNLESGIPARFSGSGSGTDFTLTIHPVEEEDAATYYCQQSNKDPFTFGGGTKLELKR

SEQ ID NO: 587 - protein, 112 aa, synthetic construct; identical to SEQ ID NO: 585

SEQ ID NO: 588 - protein, 112 aa, synthetic construct
DIVLTQSPASLAVSLGQRATISCRASQSVSTSSYSYMHWYQQKPGQAPKLLIKYASNLESGVPARFSGSGSGTDFTLNIHPVEEEDTATYYCQHSWEIPLTFGAGAKLELKR

SEQ ID NO: 589 - protein, 112 aa, synthetic construct
DIVLTQSPASLAVSLGQRATISCRASQSVSTSSYSYMHWYQQKPGQPPKLLIKYASNLESGVPARFSGSGSGTDFTLNVHPVEEEDTATYYCQHSWEIPLTFGAGTKLELKR

SEQ ID NO: 590 - protein, 112 aa, synthetic construct
DIVLTQSPASLAVSLGQRATISCRASQSVSTSSYSYMHWYQQKPGQPPKLLIKYASNLESGVPARFSGSGSGTDFTLNIHPVEEEDTATYYCQHSWEIPLTFGAGTKLELKR

SEQ ID NO: 591 - protein, 110 aa, synthetic construct
QAVVTQESALTTSPGGTVILTCRSSTGAVTTSNYANWVQEKPDHLFTGLIGGTSNRAPGVPVRFSGSLIGDKAALTITGAQTEDDAMYFCALWYSTHYVFGGGTKVTVLR

SEQ ID NO: 592 - protein, 110 aa, synthetic construct; identical to SEQ ID NO: 591

SEQ ID NO: 593 - protein, 110 aa, synthetic construct; identical to SEQ ID NO: 591

SEQ ID NO: 594 - protein, 112 aa, synthetic construct; identical to SEQ ID NO: 577

SEQ ID NO: 595 - protein, 110 aa, synthetic construct
QAVVTQESALTTSPGGTVILTCRSSTGAVTTSNYANWVQEKPDHLFTGLIGGTSNRAPGVPVRFSGSLIGDKAALTITGAQTEDDAMYFCALWYSTHWVFGGGTKLTVLR

SEQ ID NO: 596 - protein, 114 aa, synthetic construct
DIVMTQSPSSLAMSVGQKVTMSCKSSQSLLNSSNQKNYLAWYQQKPGQSPKLLVYFASTRESGVPDRFIGSGSGTDFTLTISSVQAEDLADYFCQQHYSTPLTFGAGTKLELKR

SEQ ID NO: 597 - protein, 108 aa, synthetic construct
DIQMTQTTSSLSASLGDRVTISCRASQDISNYLNWYQQKPDGTVKLLIYYTSRLHSGVPSRFSGSGSGTDYSLTISNLEQEDIATYFCQQDNTLPRTFGGGTKLEIKR

SEQ ID NO: 598 - protein, 108 aa, synthetic construct
EIQMTQSPSSMSASLGDRITITCQATQDIVKNLNWYQQKPGKPPSFLIYYATELAEGVPSRFSGSGSGSDYSLTISNLESEDFADYYCLQFYEFPYTFGGGTKLEIKR

SEQ ID NO: 599 - protein, 112 aa, synthetic construct
DIVLTQSPASLAVSLGQRATISCKASQSVDYDGDSYMNWYRQKPGQPPKLLIYAASNLESGIPARFSGSGSGTDFTLNIHPVEEEDAATYYCQQSNEDPWTFGGGTKLEIKR

SEQ ID NO: 600 - protein, 108 aa, synthetic construct; identical to SEQ ID NO: 581

SEQ ID NO: 601 - protein, 107 aa, synthetic construct
QIVLTQSPAIMSASPGEKVTITCSASSSVSYMHWFQQKPGTSPKLWIYSTSNLASGVPARFSGSGSGTSYSLTISRMEAEDAATYYCQQRSSFPYTFGGGTKLEIKR

SEQ ID NO: 602 - protein, 108 aa, synthetic construct
DIKMTQSPSSMYASLGERVTITCKASQDINSYLSWFQQKPGKSPKTLIYRANRLVDGVPSRFSGSGSGQDYSLTISSLEYEDMGIYYCLQYDEFPLTFGAGTKLELKR

SEQ ID NO: 603 - protein, 108 aa, synthetic construct
DIQMTQSPSSLSASLGERVSLTCRASQDIHGYLNLFQQKPGETIKHLIYETSNLDSGVPKRFSGSRSGSDYSLIIGSLESEDFADYYCLQYASSPLTFGAGTKLELKR

SEQ ID NO: 604 - protein, 108 aa, synthetic construct
DIVMTQSHKFMSTSVGDRVSITCKASQDVGTAVAWYQQKPGQSPKLLIYWASTRHTGVPDRFTGSGSGTDFTLTISNVQSEDLADYFCQQYSSYPFTFGSGTKLEIKR

SEQ ID NO: 605 - protein, 108 aa, synthetic construct
SIVMTQTPKFLLVSAGDRVTITCKASQSVSNDVAWYQQKPGQSPKLLIYYASNRYTGVPDRFTGSGYGTDFTFTISTVQAEDLAVYFCQQDYTSLPTFGAGTKLEIKR

SEQ ID NO: 606 - protein, 108 aa, synthetic construct
ETTVTQSPASLSVATGEKVTIRCITSTDIDDDMNWYQQKPGEPPKLLISEGNTLRPGVPSRFSSSGYGTDFVFTIENTLSEDVADYYCLQSDNMPLTFGAGTKLELKR

SEQ ID NO: 607 - protein, 108 aa, synthetic construct
DIQMTQTTSSLSASLGDRVTISCRASQDISNYLNWYQQKPDGTVKLLIYYTSRLHSGVPSRFSGSGSGTDYSLTISNLEQEDIATYFCQQGNTLPFTFGSGTKLEIKR

SEQ ID NO: 608 - protein, 108 aa, synthetic construct
DIQMTQTTSSLSASLGDRVTISCSASQGISNYLNWYQQKPDGTVKLLIYYTSSLHSGVPSRFSGSGSGTDYSLTISNLEPEDIATYYCQQYSKLPYTFGGGTKLEIKR

SEQ ID NO: 609 - protein, 108 aa, synthetic construct
DIVMTQSPATLSVTPGDRVSLSCRASQSISDYLHWYQQKSHESPRLLIKYASQSISGIPSRFSGSGSGSDFTLSINSVEPEDVGVYYCQNGHSFPWTFGGGTKLEIKR

SEQ ID NO: 610 - protein, 108 aa, synthetic construct
EIQMTQSPSSMSASLGDRITITCQATQDIVKNLNWYQQKPGKPPSFLIYYATELAEGVPSRFSGSGSGSDYTLTISNLESEDFATYYCLQFYEFPYTFGGGTKLEIKR

SEQ ID NO: 611 - protein, 108 aa, synthetic construct; identical to SEQ ID NO: 598

SEQ ID NO: 612 - protein, 108 aa, synthetic construct
DIQMTQSPASLSASVGETVTITCRASGNIHNYLAWYQQKQGKSPQLLVYNAKTLADGVPSRFSGSGSGTQYSLKINSLQPEDFGSYYCQHFWSTPWTFGGGTKLEIKR

SEQ ID NO: 613 - protein, 110 aa, synthetic construct
QAVVTQESALTTSPGGTVILTCRSSTGAVTTSNYANWVQEKPDHLFTGLIGGTSYRAPGVPVRFSGSLIGDKAALTITGAQTEDDAMYFCALWYSTHYVFGGGTKVTVLR

SEQ ID NO: 614 - protein, 108 aa, synthetic construct
DIQMTQSPSSLSASLGERVSLTCRASQEISGYLSWLQQKPDGTIKRLIYAASTLDSGVPKRFSGSRSGSDYSLTISSLESEDFADYYCLQYASYPWTFGGGTKLEIKR

SEQ ID NO: 615 - protein, 108 aa, synthetic construct
DIVMTQSPATLSVTPGDRVSLSCRASQSISDYLHWYQQKSHESPRLLIKYASQSISGIPSRFSGSGSGSDFTLSINSVEPEDVGVYYCQNGHSFPYTFGGGTKLEIKR

SEQ ID NO: 616 - protein, 107 aa, synthetic construct
ENVLTQSPAIMSASLGEKVTMSCRASSSVNYMYWYQQKSDASPKLWIYYTSNLAPGVPARFSGSGSGNSYSLTISSMEGEDAATYYCQQFTSSPSTFGCGTKLEIKR

SEQ ID NO: 617 - protein, 108 aa, synthetic construct
ETTVTQSPASLSMAIGEKVTIRCITNTDIDDDMNWYQQKPGEPPKLLISEGNTLRPGVPSRFSSSGYGTDFVFTIENMLSEDVADYYCLQSDNLPLTFGCGTKLELKR

SEQ ID NO: 618 - protein, 116 aa, synthetic construct
QLVLTQSSSASFSLGASAKLTCTLSSQHSTYTIEWYQQQPLKPPKYVMELKKDGSHSTGDGIPDRFSGSSSGADRYLSISNIQPEDEAIYICGVGDTIKEQFVYVFGCGTKVTVLG

SEQ ID NO: 619 - protein, 107 aa, synthetic construct
QIVLTQSPAIMSASPGEKVTMTCSASSSVSYMHWYQQKSGTSPKRWIYDTSKLASGVPARFSGSGSGTSYSLTISSMEAEDAATYYCQQWSSNPLTFGCGTKLELKR

SEQ ID NO: 620 - protein, 107 aa, synthetic construct
DIKMTQSPSSMYASLGERVTITCKASQDINSYLSWFQQKPGKSPKTLIYRANRLVDGVPSRFSGSGSGQDYSLTISSLEYEDMGIYYCLHYDEFPPTFGAGTKLELK

SEQ ID NO: 621 - protein, 107 aa, synthetic construct
DIKMTQSPSSMYASLGERVTITCKASQDINSYLNWFQQKPGKSPKTLIYRANRLVDGVPSRFSGSGSGQDYSLTISSLEYEDMGIYYCLQYDEFPPTFGAGTKLELK

SEQ ID NO: 622 - protein, 107 aa, synthetic construct; identical to SEQ ID NO: 512

SEQ ID NO: 623 - protein, 107 aa, synthetic construct; identical to SEQ ID NO: 512

SEQ ID NO: 624 - protein, 107 aa, synthetic construct
DIKMTQSPSSMYASLGERVTITCKASQDINSYLSWFQQKPGKSPKTLIYRANRLVDGVPSRFSGSGSGQDYSLTISSLEYEDMGIYYCPQYVESPPTFGAGTKLELK

SEQ ID NO: 625 - protein, 107 aa, synthetic construct; identical to SEQ ID NO: 512

SEQ ID NO: 626 - protein, 107 aa, synthetic construct; identical to SEQ ID NO: 512

SEQ ID NO: 627 - protein, 107 aa, synthetic construct
DIKMTQSPSSMYASLGERVTITCKASQDINSYLSWFHQKPGKSPKTLIYRANRLVDGVPSRFSGSGSGQDYSLTISSLEYEDMGIYYCLQYDEFPPTFGAGTKLELK

SEQ ID NO: 628 - protein, 107 aa, synthetic construct
DIKMTQSPSSMYASLGERVTITCKASQDINSYLSWFQQKPGKSPKTLIYRANRLVDGVPSRFSGSGSGQDYSLTISSLEYEDMGIYYCLQYDEFPLTFGGGTKLEIK

SEQ ID NO: 629 - protein, 107 aa, synthetic construct
DIKMTQSPSSMYASLGERVTITCKASQDINGYLSWFQQKPGKSPQTLLYRANRLVDGVPSRFRGSGSGQDYSLTISSLEYEDMGIYYCLQYDEFPPTFGAGTKLELK

SEQ ID NO: 630 - protein, 107 aa, synthetic construct; identical to SEQ ID NO: 512

SEQ ID NO: 631 - protein, 107 aa, synthetic construct
DIKMTQSPSSMYASLGERVTITCKASQDINSYLSWFQQKPGKSPKTLIYRANRLVDGVPSRFSGSGSGQDYSLTISSLEYEDMGFYYCLQYDEFPPTFGAGTKLELK

SEQ ID NO: 632 - protein, 107 aa, synthetic construct
DIKMTQSPSSIYASLGERVTITCKASQDINSYLNWFQQKPGKSPKTLIYRANRLVDGVPSRFSGSGSGQDYSLTISSLEYEDMGIYYCLQYDEFPPTFGVGTKLELK

SEQ ID NO: 633 - protein, 107 aa, synthetic construct; identical to SEQ ID NO: 512

SEQ ID NO: 634 - protein, 107 aa, synthetic construct
DIKMTQSPSSMYASLGERVTITCKASQDINSYLSWFQQKPGKSPKTLIYRAKRLVDGVPSRFSGSGSGQDYSLTISSLEYEDMGIYYCLQYDEFPPTFGAGTKLELK

SEQ ID NO: 635 - protein, 107 aa, synthetic construct
DIKMTQSPSSMYASLGERVTITCKASQDINSYLSWFQQKPGKSPKTLIYRANRLVDGVPSRFSGSGSGQDYSLTISSLEYEDMGIYYCLQYDEFPPTFGAGAKLELK

SEQ ID NO: 636 - protein, 107 aa, synthetic construct
NIVMTQSPKSMSMSVGERVTLSCKASENVVTYVSWYQQKPEQSPKLLIYGASNRYTGVPDRFTGSGSATDFTLTISSVQAEDLADYHCGQSYSYPFTFGSGTKLEIK

SEQ ID NO: 637 - protein, 107 aa, synthetic construct; identical to SEQ ID NO: 636

SEQ ID NO: 638 - protein, 107 aa, synthetic construct; identical to SEQ ID NO: 636

SEQ ID NO: 639 - protein, 107 aa, synthetic construct; identical to SEQ ID NO: 636

SEQ ID NO: 640 - protein, 109 aa, synthetic construct
NIVMTQSPKSMSMSVGERVTLSCKASENVVTYVSWYQQKPEQSPKLLIYGASNRYTGVPDRFTGSGSATDFTLTISSVQAEDLADYHCGQSYSYLIHVRFGSGTKLEIK

SEQ ID NO: 641 - protein, 109 aa, synthetic construct; identical to SEQ ID NO: 640

SEQ ID NO: 642 - protein, 107 aa, synthetic construct
QIVLTQSPAIMSASPGEKVTMTCSASSSVSYMHWYQQKSGTSPKRWIYDTSKLASGVPARFSGSGSGTSYSLTISSMEAEDAATYYCQQWSSNPLYTFGGGTKLEIK

SEQ ID NO: 643 - protein, 108 aa, synthetic construct
QIVLTQSPAIMSASPGEKVTMTCSASSSVSYMHWYQQKSGTSPKRWIYDTSKLASGVPARFSGSGSGTSYSLTISSMEAEDAATYYCQQWSSNPHVHVFGGGTKLEIK

SEQ ID NO: 644 - protein, 107 aa, synthetic construct; identical to SEQ ID NO: 642

SEQ ID NO: 645 - protein, 107 aa, synthetic construct; identical to SEQ ID NO: 642

SEQ ID NO: 646 - protein, 111 aa, synthetic construct
DIVLTQSPASLAVSLGQRATISCKASQSVDYDGDSYMNWYQQKPGQPPKLLIYAASNLESGIPARFSGSGSGTDFTLNIHPVEEEDAATYYCQQSNEDPLTFGAGTKLELK

SEQ ID NO: 647 - protein, 111 aa, synthetic construct; identical to SEQ ID NO: 646

SEQ ID NO: 648 - protein, 111 aa, synthetic construct
DIVLTQSPASLAVSLGQRATISCKASQSVDYDGDSYMNWYQQKPGQPPQLLIYAASNLQSGIPARFSGSGSGTDFTLNIHPVEEEDAATYYCQQSNEDPLTFGAGTKLELK

SEQ ID NO: 649 - protein, 111 aa, synthetic construct
DIVLTQSPASLAVSLGQRATISCKASQSVDYDGDSYMNWYQQKPGQPPKLLIYAASNLESGIPARFGGSGSGTDFTLNIHPVEEEDAATYYCQQSNEDPLTFGAGTKLELK

SEQ ID NO: 650 - protein, 107 aa, synthetic construct
DIQMTQSPSSLSASLGGKVTITCKASQDINKYIAWYQHKPGKGPRLLIHYTSTLQPGIPSRFSGSGSGRDYSFSISNLEPEDIATYYCLQYDILMYTFGGGTKLEIK

SEQ ID NO: 651 - protein, 107 aa, synthetic construct; identical to SEQ ID NO: 650

SEQ ID NO: 652 - protein, 107 aa, synthetic construct
EIQMTQSPSSMSASLGDRITITCQATQDIVKNLNWYQQKPGKPPSFLIYYATELAEGVPSRFSGSGSGSDYSLTISNLESEDFADYYCLQFYEFPLTFGAGTKLELK

SEQ ID NO: 653 - protein, 107 aa, synthetic construct; identical to SEQ ID NO: 652

SEQ ID NO: 654 - protein, 107 aa, synthetic construct; identical to SEQ ID NO: 652

SEQ ID NO: 655 - protein, 105 aa, synthetic construct
ENVLTQSPAIMSASLGEKVTMSCRASSSVNYMYWYQQKSDASPKLWIYYTSNLAPGVPARFSGSGSGNSYSLTISSMEGEDAATYYCQQFTSSHTFGGGTKLEIK

SEQ ID NO: 656 - protein, 105 aa, synthetic construct; identical to SEQ ID NO: 655

SEQ ID NO: 657 - protein, 111 aa, synthetic construct
DIVLTQSPASLAVSLGQRATISCKASQSVDYDGDSYMNWYQQKPGQPPKLLIYAASNLESGIPARFSGSGSGTDFTLNIHPVEEEDAATYYCQQSNKDPLTFGAGTKLELK

SEQ ID NO: 658 - protein, 111 aa, synthetic construct; identical to SEQ ID NO: 646

SEQ ID NO: 659 - protein, 111 aa, synthetic construct
DIVLTQSPASLAVSLGQRATISCKASQSVDYDGDSYMNWYQQKPGQPPKLLIYAASNLESGIPARFSGSGSGTDFTLNIHPVEEEDAATYYCQQSNKDPFTFGAGTKLELK

SEQ ID NO: 660 - protein, 111 aa, synthetic construct
DIVLTQSPASLAVSLGQRATISCRASQSVSTSSYSYMHWYQQKPGQAPKLLIKYASNLESGVPARFSGSGSGTDFTLNIHPVEEEDTATYYCQHSWEIPLTFGAGAKLELK

SEQ ID NO: 661 - protein, 111 aa, synthetic construct
DIVLTQSPASLAVSLGQRATISCRASQSVSTSSYSYMHWYQQKPGQPPKLLIKYASNLESGVPARFSGSGSGTDFTLNVHPVEEEDTATYYCQHSWEIPLTFGAGTKLELK

SEQ ID NO: 662 - protein, 107 aa, synthetic construct
DIQMTQTPSSLSASLGDRVTISCRASQDISNYLNWYQQKPDGTVKLLIYSTSRLHSGVPSRFSGSGSGTDYSLTISNLEQEDIATYFCQQGNTLPWTFGGGTKLEIK

SEQ ID NO: 663 - protein, 107 aa, synthetic construct
DIQMTQTPSSLSASLGDRVTISCRASQDISNYLNWYQQKPDGTVKLLIYSTSRLHSGVPSRFSGSGSGTDYSLTISNLEQEDIATYFCQQGNALPWTFGGGTKLEIK

SEQ ID NO: 664 - protein, 107 aa, synthetic construct; identical to SEQ ID NO: 662

SEQ ID NO: 665 - protein, 109 aa, synthetic construct
QAVVTQESALTTSPGGTVILTCRSSTGAVTTSNYANWVQEKPDHLFTGLIGGTSNRAPGVPVRFSGSLIGDKAALTITGAQTEDDAMYFCALWYSTHYVFGGGTKVTVL

SEQ ID NO: 666 - protein, 109 aa, synthetic construct; identical to SEQ ID NO: 665

SEQ ID NO: 667 - protein, 109 aa, synthetic construct; identical to SEQ ID NO: 665

SEQ ID NO: 668 - protein, 107 aa, synthetic construct
ETTVTQSPASLSVATGEKVTIRCITSTDIDDDMNWYQQKPGEPPKLLISEGNTLRPGVPSRFSSSGYGTDFVFTIENTLSEDVADYYCLQSDNMPFTFGSGTKLEIK

SEQ ID NO: 669 - protein, 108 aa, synthetic construct
QAVVTQESALTTSPGGTVILTCRSSTGAVTTSNYANWVQEKPDHLFTGLIGGTSNRAPGVPVRFSGSLIGDKAALTITGAQTEDDAMYFCALWYSTHYFGGGTKVTVL

SEQ ID NO: 670 - protein, 111 aa, synthetic construct; identical to SEQ ID NO: 646

SEQ ID NO: 671 - protein, 114 aa, synthetic construct
DIVMSQSPSSLAVSVGEKVTMSCKSSQSLLYSTNQKNYLAWYQQKPGQSPKLLIYWASTRESGVPDRFTGSGSGTDFTLTISSVKAEDLAVYYCQQYYSYPPWTFGGGTKLEIK

SEQ ID NO: 672 - protein, 111 aa, synthetic construct
DIVLTQSPASLAVSLGQRATISCKASQSVDYDGDSYMNWYQQKPGQPPKLLIYAASNLESGIPARFSGSGSGTDFTLNIHPVEEEDAATYYCQQSNEDPPTFGGGTKLEIK

SEQ ID NO: 673 - protein, 107 aa, synthetic construct
DIQMTQSPASLAASVGETVTITCRASENIYYSLAWYQQKQGKSPQLLIYNANSLEDGVPSRFSGSGSGTQYSMKINSMQPEDTATYFCKQAYDVPYTFGGGTKLEIK

SEQ ID NO: 674 - protein, 107 aa, synthetic construct
DIQMTQTTSSLSASLGDRVTISCRASQDISNYLNWYQQKPDGTVKLLIYYTSRLHSGVPSRFSGSGSGTDYSLTISNLEQEDIATYFCQQDNTLPRTFGGGTKLEIK

SEQ ID NO: 675 - protein, 107 aa, synthetic construct
DIQMTQTTSSLSASLGDRVTISCRASQDISNYLNWYQQKPDGTVKLLIYYTSRLHSGVPSRFSGSGSGTDYSLTISNLEQEDIATYFCQQGNTLPWTFGGGTKLEIK

SEQ ID NO: 676 - protein, 107 aa, synthetic construct; identical to SEQ ID NO: 515

SEQ ID NO: 677 - protein, 111 aa, synthetic construct
DIVLTQSPASLAVSLGQRATISCKASQSVDYDGDSYMNWYRQKPGQPPKLLIYAASNLESGIPARFSGSGSGTDFTLNIHPVEEEDAATYYCQQSNEDPWTFGGGTKLEIK

SEQ ID NO: 678 - protein, 109 aa, synthetic construct; identical to SEQ ID NO: 541

SEQ ID NO: 679 - protein, 107 aa, synthetic construct; identical to SEQ ID NO: 652

SEQ ID NO: 680 - protein, 115 aa, synthetic construct
QLVLTQSSSASFSLGASAKLTCTLSSQHSTYTIEWYQQQPLKPPKYVMELKKDGSHSTGDGIPDRFSGSSSGADRYLSISNIQPEDEAIYICGVGDTIKEQFVFVFGGGTKVTVL

SEQ ID NO: 681 - protein, 111 aa, synthetic construct; identical to SEQ ID NO: 672

SEQ ID NO: 682 - protein, 107 aa, synthetic construct
DIQMTQSPSSLSASLGERVSLTCRASQDIGISLNWLQQEPDGTIKRLIYATSSLDSGVPKRFSGSRSGSDYSLTISSLESEDFVDYYCLQYASSPYTFGGGTKLEIK

SEQ ID NO: 683 - protein, 106 aa, synthetic construct
DIQMTQSPASLSASVGETVTITCRASENIYSYLAWYQQKQGKSPQLLVYNAKNLADGVPSRFSGSGSGTQYSLKINSLQSEDFGYYCQHFWGTPYTFGGGTKLEIK

SEQ ID NO: 684 - protein, 107 aa, synthetic construct
DIKMTQSPSSMYASLGERVTITCKASQDINSYLSWFQQKPGKSPKTLIYRANRLVDGVPSRFSGSGSGQDYSLTISSLEYEDMGIYYCLQYDEFPLTFGAGTKLELK

SEQ ID NO: 685 - protein, 107 aa, synthetic construct
DIQMTQSPSSLSASLGERVSLTCRASQDIHGYLNLFQQKPGETIKHLIYETSNLDSGVPKRFSGSRSGSDYSLIIGSLESEDFADYYCLQYASSPLTFGAGTKLELK

SEQ ID NO: 686 - protein, 107 aa, synthetic construct
DIVMTQSHKFMSTSVGDRVSITCKASQDVGTAVAWYQQKPGQSPKLLIYWASTRHTGVPDRFTGSGSGTDFTLTISNVQSEDLADYFCQQYSSYPFTFGSGTKLEIK

SEQ ID NO: 687 - protein, 109 aa, synthetic construct
QAVVTQESALTTSPGETVTLTCRSSTGAVTTSNYANWVQEKPDHLFTGLIGGTNNRAPGVPARFSGSLIGDKAALTITGAQTEDEAIYFCALWYSNHLVFGGGTKLTVL

SEQ ID NO: 688 - protein, 111 aa, synthetic construct
DIVLTQSPASLAVSLGQRATISCKASQSVDYDGDSYMNWYQQKPGQPPKLLIYVASNLESGIPARFRGSGSGTDFTLNIHPVEEEDAAIYYCQQSHEDPRTFGGGTKLEIK

SEQ ID NO: 689 - protein, 106 aa, synthetic construct
ENVLTQSPAIMSASPGEKVTMTCSASSSVSYMHWYQQKSSTSPKLWIYDTSKLASGVPGRFSGSGSGNSYSLTISSMEAEDVATYYCFQGSGYPLTFGAGTKLELK

SEQ ID NO: 690 - protein, 107 aa, synthetic construct; identical to SEQ ID NO: 548

SEQ ID NO: 691 - protein, 107 aa, synthetic construct
ETTVTQSPASLSVATGEKVTIRCITSTDIDDDMNWYQQKPGEPPKLLISEGNTLRPGVPSRFSSSGYGTDFVFTIENTLSEDVADYYCLQSDNMPLTFGAGTKLELK

SEQ ID NO: 692 - protein, 107 aa, synthetic construct
DIQMTQTTSSLSASLGDRVTISCRASQDISNYLNWYQQKPDGTVKLLIYYTSRLHSGVPSRFSGSGSGTDYSLTISNLEQEDIATYFCQQGNTLPFTFGSGTKLEIK

SEQ ID NO: 693 - protein, 107 aa, synthetic construct
DIQMTQTTSSLSASLGDRVTISCSASQGISNYLNWYQQKPDGTVKLLIYYTSSLHSGVPSRFSGSGSGTDYSLTISNLEPEDIATYYCQQYSKLPYTFGGGTKLEIK

SEQ ID NO: 694 - protein, 107 aa, synthetic construct
DIVMTQSPATLSVTPGDRVSLSCRASQSISDYLHWYQQKSHESPRLLIKYASQSISGIPSRFSGSGSGSDFTLSINSVEPEDVGVYYCQNGHSFPWTFGGGTKLEIK

SEQ ID NO: 695 - protein, 109 aa, synthetic construct
QAVVTQESALTTSPGGTVILTCRSSTGAVTTSNYANWVQEKPDHLFTGLIGGTSYRAPGVPVRFSGSLIGDKAALTITGAQTEDDAMYFCALWYSTHYVFGGGTKVTVL

SEQ ID NO: 696 - protein, 107 aa, synthetic construct
DIQMTQSPSSLSASLGERVSLTCRASQEISGYLSWLQQKPDGTIKRLIYAASTLDSGVPKRFSGSRSGSDYSLTISSLESEDFADYYCLQYASYPWTFGGGTKLEIK

SEQ ID NO: 697 - protein, 112 aa, synthetic construct
DIVLTQSPASLAVSLGQRATISCKASQSVDYDGDSYMNWYQQKPGQPPKLLIYAASNLESGIPARFSGSGSGTDFTLNIHPVEEEDAATYYCQQSNEDPLPTFGAGTQRELK

SEQ ID NO: 698 - protein, 106 aa, synthetic construct
QIVLTQSPAIMSASPGEKVTMTCSASSSVSYMHWYQQKSGTSPKRWIYDTSKLASGVPVRFSGSGSGTSYSLTISSMEAEDAATYYCQQWSSNPLTFGAGTKLELK

SEQ ID NO: 699 - protein, 107 aa, synthetic construct; identical to SEQ ID NO: 547

SEQ ID NO: 700 - protein, 107 aa, synthetic construct
DIQMTQSPASLSASVGETVTITCRASENIYSYLAWYQQKQGKSPQLLVYNAKTLAEGVPSRFSGSGSGTQFSLKINSLQPEDFGSYYCQHHYGTPFTFGSGTKLEIK

SEQ ID NO: 701 - protein, 105 aa, synthetic construct
ENVLTQSPAIMSASLGEKVTMSCRASSSVNYMYWSQQKSDASPKLWIYYTSNLAPGVPPRFSGSGSGNSYSLTISSMEGEDAATYYCQQFTSSLTFGAGTKLELK

SEQ ID NO: 702 - protein, 109 aa, synthetic construct
QAVVTQESALTTSPGETVTLTCRSSTGAVTTSNYANWVQEKPDHLFTGLIGSTNNRAPGVPARFSGSLIGDKSALTITGAQTEDEAIYFCTLWYSNHWVFGGGTKLTVL

SEQ ID NO: 703 - protein, 107 aa, synthetic construct; identical to SEQ ID NO: 686

SEQ ID NO: 704 - protein, 107 aa, synthetic construct; identical to SEQ ID NO: 512

SEQ ID NO: 705 - protein, 107 aa, synthetic construct
DIQMTQSPASLSVSVGETVTITCRASENIYSNLAWYQQKQGKSPQLLVYAATNLADGVPSRFSGSGSGTQYSLKINSLQSEDFGSYYCQHFWGTPFTFGSGTKLEIK

SEQ ID NO: 706 - protein, 107 aa, synthetic construct
DIVMTQSPATLSVTPGDRVSLSCRASQSISDYLHWYQQKSHESPRLLIKYASQSISGIPSRFSGSGSGSDFTLSINSVEPEDVGVYYCQNGHSFPYTFGGGTKLEIK

SEQ ID NO: 707 - protein, 109 aa, synthetic construct; identical to SEQ ID NO: 541

SEQ ID NO: 708 - protein, 107 aa, synthetic construct
EIFVTQSPASLSMAIGEKVTIRCITSTDIDDDMNWYQQKPGEPPKLLISEGNTLRPGVPSRFSSSGYGTDFVFTIENMLSEDVADYYCLQSDNLPLTFGAGTKLELK

SEQ ID NO: 709 - protein, 106 aa, synthetic construct
QIVLTQSPAIMSASPGEKVTITCSASSSVSYMHWFQQKPGTSPKLWIYSTSNLASGVPARFSGSGSGTSYSLTISRMEAEDAATYYCQQRSSYPPTFGSGTKLELK

SEQ ID NO: 710 - protein, 106 aa, synthetic construct
QIVLTQSPAIMSASPGEKVTMTCSASSSVSYMHWYQQKSGTSPKRWIYDTSKLASGVPARFSGSGSGTSYSLTISSMEAEDAATYYCQQWSSNPLTFGSGTKLEIK

SEQ ID NO: 711 - protein, 109 aa, synthetic construct
QIVLTQSPAIMSASPGEKVTLTCSASSSVSSSYLYWYQQKPGSSPKLWIYSTSNLASGVPARFSGSGSGTSYSLTISSMEAEDAASYFCHQWSSYPPTFGAGTKLELKR

SEQ ID NO: 712 - protein, 116 aa, synthetic construct
QLVLTQSSSASFSLGASAKLTCTLSSQHSTYTIEWYQQQPLKPPKYVMELKKDGSHSTGDGIPDRFSGSSSGADRYLSISNIQPEDEAIYICGVGDTIKEQFVYVFGGGTKVTVLR

SEQ ID NO: 713 - protein, 113 aa, synthetic construct
DVLMTQTPLSLPVSLGDQASISCRSSQSIVHSNGNTYLEWYLQKPGQSPKLLIYKVSNRFSGVPDRFSGSGSGTDFTLKISRVEAEDLGVYYCFQGSHVPWTFGGGTKLEIKR

SEQ ID NO: 714 - protein, 108 aa, synthetic construct; identical to SEQ ID NO: 555

SEQ ID NO: 715 - protein, 113 aa, synthetic construct
DVVMTQTPLTLSVTIGQPASISCKSSQSLLDSDGKTYLNWLLQRPGQSPKRLIYLVSKLDSGVPDRFTGSGSGTDFTLKISRVEAEDLGVYYCWQGTHFPWTFGGGTKLEIKR

SEQ ID NO: 716 - protein, 109 aa, synthetic construct
QIVLTQSPAIMSASPGEKVTLPCSASSSVSSSYLYWYQQKPGSSPKLWIYSTSNLASGVPARFSGSGSGTSYSLTISSMEAEDAASYFCHQWSSYPPTFGAGTKLELKR

SEQ ID NO: 717 - protein, 113 aa, synthetic construct
DVLMTQTPLSLPVSLGDQASISCRSSQSIVYSNGNTYLEWYLQKPGQSPKLLIYKVSNRFSGVPDRFSGSGSGTDFTLKISRVEAEDLGVYYCFQGSHVPPTFGGGTKLEIKR

SEQ ID NO: 718 - protein, 108 aa, synthetic construct
DIQMTQSPASLSVSVGETVTITCRASENIYNNLAWYQQKQGKSPQLLVYAATNLADGVPSRFSGSGSGTQYSLKINSLQSEDFGSYYCQHFWGTPWTFGGGTKLEIKR

SEQ ID NO: 719 - protein, 109 aa, synthetic construct; identical to SEQ ID NO: 711

SEQ ID NO: 720 - protein, 108 aa, synthetic construct
QIVLTQSPAIMSASPGEKVTMTCSASSSVSYMYWYQQKPGSSPRLLIYDTSNLASGVPVRFSGSGSGTSYSLTISRMEAEDAATYYCQQWSTYPPITFGAGTKLELKR

SEQ ID NO: 721 - protein, 107 aa, synthetic construct
QIVLTQSPAIMSASPGEKVTMTCSASSSVSYMYWYQQKPGSSPRLLIYDTSNLASGVPVRFSGSGSGTSYSLTISRMEAEDAATYYCQQWSSYPFTFGSGTKLEIKR

SEQ ID NO: 722 - protein, 107 aa, synthetic construct
QIVLSQSPAILSASPGEKVTMTCRASSSVSYMHWYQQKPGSSPKPWIYATSNLASGVPARFSGSGSGTSYSLTISRVEAEDAATYYCQQWSSNPYTFGGGTKLEIKR

SEQ ID NO: 723 - protein, 108 aa, synthetic construct
DIQMTQSPASLSVSVGETVTITCRASENIYSNLAWYQQKQGKSPQLLVYAATNLADGVPSRFSGSGSGTQYSLKINSLQSEDFGSYYCQHFWGTPWTFGGGTKLEIKR

SEQ ID NO: 724 - protein, 108 aa, synthetic construct
DIVMTQSHKFMSTSVGDRVSITCKASQDVSTAVAWYQQKPGQSPKLLIYWASTRHTGVPDRFTGSGSGTDYTLTISSVQAEDLALYYCQQHYSTPWTFGGGTKLEIKR

SEQ ID NO: 725 - protein, 113 aa, synthetic construct; identical to SEQ ID NO: 715

SEQ ID NO: 726 - protein, 113 aa, synthetic construct
DVLMTQTPLSLPVSLGDQASISCRSSQSIVHSNGNTYLEWYLQKPGQSPKFLIYKVSNRFSGVPDRFSGSGSGTDFTLKISRVEAEDLGVYYCFQGSHVPPTFGGGTKLEIKR

SEQ ID NO: 727 - protein, 108 aa, synthetic construct
ETTVTQSPASLSVATGEKVTIRCITSTDIDDDMNWYQQKPGEPPKLLISEGNTLRPGVPSRFSSSGYGTDFVFTIENTLSEDVADYYCLQSDNMPLTFGGGTKLEIKR

SEQ ID NO: 728 - protein, 109 aa, synthetic construct
DIQMTQSPSSLSASLGGKVTITCKASQDINKYIAWYQHKPGKGPRLLIHYTSTLQPGIPSRFSGSGSGRDYSFSISNLEPEDIATYYCLQYDNLYMYTFGGGTKLEIKR

SEQ ID NO: 729 - protein, 108 aa, synthetic construct
DIQMNQSPSSLSASLGDTITITCHASQNINVWLSWYQQKPGNIPKLLIYKASNLHTGVPSRFSGSGSGTGFTLTISSLQPEDIATYYCQQGQSYPYTFGGGTKLEIKR

SEQ ID NO: 730 - protein, 107 aa, synthetic construct
QIVLTQSPALMSASPGEKVTMTCSASSSVSYMYWYQQKPRSSPKPWIYLTSNLASGVPARFSGSGSGTSYSLTISSMEAEDAATYYCQQWSSNPPTFGGGTKLEIKR

SEQ ID NO: 731 - protein, 113 aa, synthetic construct
DVVMTQTPLTLSVTIGQPASISCKSSQSLLDSDGKTYLNWLLQRPGQSPKRLIYLVSKLDSGVPDRFTGSGSGTDFTLKISRVEAEDLGFYYCWQGTHFPWTFGGGTKLEIKR

SEQ ID NO: 732 - protein, 107 aa, synthetic construct
QIVLTQSPAIMSASPGEKVTMTCSASLSVSDMYWYQQKPGSSPRLLIYDTSNLASGVPVRFSGSGSGTSYSLTISRMEAEDAATYYCQQWSSYPFTFGSGTKLEIKR

SEQ ID NO: 733 - protein, 109 aa, synthetic construct
QIVLTQSPAIMSASPGEKVTLTCSASSSVSSSYLYWYQQRPGSSPKLWIYSTSNLASGVPARFSGSGSGTSYSLTISSMEAEDAASYFCHQWSSYPPTFGAGTKLELKR

SEQ ID NO: 734 - protein, 107 aa, synthetic construct
ENVLTQSPAIMSASLGEKVTMSCRASSSVNYMYWYQQKSDASPKLWIYYTSNLAPGVPARFSGSGSGNSYSLTISSMEGEDAATYYCQQFTSSPSTFGGGTKLEIKR

SEQ ID NO: 735 - protein, 108 aa, synthetic construct
ETTVTQSPASLSMAIGEKVTIRCITNTDIDDDMNWYQQKPGEPPKLLISEGNTLRPGVPSRFSSSGYGTDFVFTIENMLSEDVADYYCLQSDNLPLTFGAGTKLELKR

SEQ ID NO: 736 - protein, 112 aa, synthetic construct
DIVLTQSPASLAVSLGQRATISCKASQSVDYDGDSYMNWYQQKPGQPPKLLIYAASNLESGIPARFSGSGSGTDFTLNIHPVEEEDAATYYCQQSNEDPWTFGGGTKLEIKR

SEQ ID NO: 737 - protein, 108 aa, synthetic construct
DIVLTQSPATLSVTPGDSVSLSCRASQSISNNLHWYQQKSHESPRLLIKYASQSISGIPSRFSGSGSGTDFTLSINSVETEDFGMYFCQQSNSWPFTFGSGTKLEIKR

SEQ ID NO: 738 - protein, 109 aa, synthetic construct
QIVLTQSPAIMSASPGEKVTLTCSASSSVSSSYLYWYQQKPGSSPKLWIYSTSNLASGVPARFSGSGSGTSYSLTISSMEAEDAASYFCHQWSSYPPTFGGGTKLEIKR

SEQ ID NO: 739 - protein, 108 aa, synthetic construct; identical to SEQ ID NO: 606

SEQ ID NO: 740 - protein, 113 aa, synthetic construct
DVVMTQTPLTLSVTIGQPASISCKSSQSLLDSDGKTYLHWLLQRPGQSPKRLIYLVSKLDSGVPDRFTGSGSGTDFTLKISRVEAEDLAVYYCWQGTHFPWTFGGGTKLEIKR

SEQ ID NO: 741 - protein, 107 aa, synthetic construct
DIQMTQSPSSLSASLGGKVTITCKASQDINKYIAWYQHKPGKGPRLLIHYTSTLQPGIPSRFSGSGSGRDYSFSISNLEPEDIATYYCLQYDNLRTFGGGTKLEIKR

SEQ ID NO: 742 - protein, 110 aa, synthetic construct
QAVVTQESALTTSPGETVTLTCRSSTGAVTTSNYANWVQEKPDHLFTGLIVGTNNRAPGVPARFSGSLIGDKAALTITGAQTEDEAIYFCVLWYSNHLVFGGGTKLTVLG

SEQ ID NO: 743 - protein, 108 aa, synthetic construct
NIVMTQSPKSMSMSVGERVTLSCKASENVGTYVSWYQQKPEQSPKLLIYGASNRYTGVPDRFTGSGSATDFTLTISSVQAEDLADYHCGQSYSYPPTFGAGTKLELKR

SEQ ID NO: 744 - protein, 112 aa, synthetic construct
DIVLTQSPASLAVSLGQRATISCRASETVDSYGYSFMHWYQQKPGQPPKLLIYRASNLESGIPARFSGSGSRTDFTLTINPVEADDVATYYCQQSNEDPRTFGGGTKLEIKR

SEQ ID NO: 745 - protein, 113 aa, synthetic construct
DIVMSQSPSSLAVSVGEKVTMSCKSSQSLLYSTNQKNYLAWYQQKPGQSPKLLLYWASTRESGVPDRFTGSGSGTDFTLTINSVKAEDLAVYYCQQYYSYRTFGGGTKLEIKR

SEQ ID NO: 746 - protein, 113 aa, synthetic construct
DVVMTQTPLTLSVTIGQPASISCKSSQSLLDSDGKTYLNWLLQRPGQSPKRLIYLVSKLDSGVPDRFTGSGSGTDFTLKISRVEAEDLGVYYCWQGTHFPFTFGSGTKLEIKR

SEQ ID NO: 747 - protein, 112 aa, synthetic construct
DIVLTQSPASLAVSLGQRATISCKASQSVDYDGDSYMNWYQQKPGQPPKLLIYAASNLESGIPARFSGSGSGTDFTLNIHPVEEEDAATYYCQQSNEDPFTFGSGTKLEIKR

SEQ ID NO: 748 - protein, 116 aa, synthetic construct
QLVLTQSSSASFSLGASAKLTCTLSSQHSTYTIEWYQQQPLKPPKYVMELKKDGSHSTGDGIPDRFSGSSSGADRYLSISNIQPEDEAIYICGVGDTIKEQFVYVFGGGTKVTVLG

SEQ ID NO: 749 - protein, 107 aa, synthetic construct
QIVLTQSPAIMSASPGEKVTMTCSASSSVSYMHWYQQKSGTSPKRWIYDTSKLASGVPARFSGSGSGTSYSLTISSMEAEDAATYYCQQWSSNPLTFGAGTKLELKR

SEQ ID NO: 750 - protein, 108 aa, synthetic construct; identical to SEQ ID NO: 581

SEQ ID NO: 751 - protein, 112 aa, synthetic construct
DIVLTQSPASLAVSLGQRATISCRASESVDNYGISFMNWFQQKPGQPPKLLIYAASNQGSGVPARFSGSGSGTDFSLNIHPMEEDDTAMYFCQQSKEVPPTFGGGTKLEIKR

SEQ ID NO: 752 - protein, 108 aa, synthetic construct
DIVMTQSPATLSVTPGDRVSLSCRASQSISDYLHWYQQKSHESPRLLIKYASQSISGIPSRFSGSGSGSDFTLSINSVEPEDVGVYYCQNGHSFPLTFGAGTKLELKR

SEQ ID NO: 753 - protein, 113 aa, synthetic construct
DVLMTQTPLSLPVSLGDQASISCRSSQSIVHSNGDTYLEWYLQKPGQSPKLLIYKVSNRFSGVPDRFSGSGSGTDFTLKISRVEAEDLGVYYCFQGSHVPLTFGAGTKLELKR

SEQ ID NO: 754 - protein, 107 aa, synthetic construct; identical to SEQ ID NO: 749

SEQ ID NO: 755 - protein, 114 aa, synthetic construct
DIVMTQSPTFLAVTASKKVTISCTASESLYSSKHKVHYLAWYQKKPEQSPKLLIYGASNRYIGVPDRFTGSGSGTDFTLTISSVQVEDLTHYYCAQFYSYPYTFGGGTKLEIKR

SEQ ID NO: 756 - protein, 116 aa, synthetic construct; identical to SEQ ID NO: 748

SEQ ID NO: 757 - protein, 112 aa, synthetic construct; identical to SEQ ID NO: 590

SEQ ID NO: 758 - protein, 107 aa, synthetic construct; identical to SEQ ID NO: 749

SEQ ID NO: 759 - protein, 108 aa, synthetic construct
DIQMTQSSSYLSVSLGGRVTITCKASDHINNWLAWYQQKPGNAPRLLISGATSLETGVPSRFSGSGSGKDYTLSITSLQTEDVATYYCQQYWSTPLTFGAGTKLELKR

SEQ ID NO: 760 - protein, 108 aa, synthetic construct
DIQMTQSPASLSASVGETVTITCRASENIYSYLAWYQQKQGKSPQLLVYNAKTLAEGVPSRFSGSGSGTQFSLKINSLQPEDFGSYYCQHHYGTPYTFGGGTKLEIKR

SEQ ID NO: 761 - protein, 108 aa, synthetic construct
DIQMTQSPASLSASVGETVTITCRASENIYSYLAWYQQKQGKSPQLLVYNAKTLAEGVPSRFSGSGSGTQFSLKINSLQPEDFGSYYCQHHYGTPPTFGGGTKLEIKR

SEQ ID NO: 762 - protein, 107 aa, synthetic construct
QIVLTQSPAIMSASPGEKVTMTCSASSSVSYMHWYQQKSGTSPKRWIYDTSKLASGVPARFSGSGSGTSYSLTISSMEAEDAATYYCQQWSSNPPTFGAGTKLELKR

SEQ ID NO: 763 - protein, 112 aa, synthetic construct; identical to SEQ ID NO: 751

SEQ ID NO: 764 - protein, 114 aa, synthetic construct; identical to SEQ ID NO: 755

SEQ ID NO: 765 - protein, 110 aa, synthetic construct
QAVVTQESALTTSPGGTVILTCRSSTGAVTTSNYANWVQEKPDHLFTGLIGGTSNRAPGVPVRFSGSLIGDKAALTITGAQTEDDAMYFCALWYSTHYVFGGGTKVTVLG

SEQ ID NO: 766 - protein, 106 aa, synthetic construct
QIVLTQSPAIMSASPGEKVTMTCSASSSISYMHWYQQKPGTSPKRWIYDTSKLASGVPARFSGSGSGTSYSLTISSMEAEDAATYYCHQRSSYPTFGAGTKLELKR

SEQ ID NO: 767-1279 - skipped (513 entries)

SEQ ID NO: 1280 - protein, 5 aa, synthetic construct
SYWIE

SEQ ID NO: 1281 - protein, 5 aa, synthetic construct
SYWIE

SEQ ID NO: 1282 - protein, 5 aa, synthetic construct
SYWIE

SEQ ID NO: 1283 - protein, 5 aa, synthetic construct
IYWIE

SEQ ID NO: 1284 - protein, 5 aa, synthetic construct
SYWIE

SEQ ID NO: 1285 - protein, 5 aa, synthetic construct
SYWIE

SEQ ID NO: 1286 - protein, 5 aa, synthetic construct
SYWIE

SEQ ID NO: 1287 - protein, 5 aa, synthetic construct
NYWIE

SEQ ID NO: 1288 - protein, 5 aa, synthetic construct
SYWIE

SEQ ID NO: 1289 - protein, 5 aa, synthetic construct
SYWIE

SEQ ID NO: 1290 - protein, 5 aa, synthetic construct
SYWIE

SEQ ID NO: 1291 - protein, 5 aa, synthetic construct
SYWIE

SEQ ID NO: 1292 - protein, 5 aa, synthetic construct
SYWIE

SEQ ID NO: 1293 - protein, 5 aa, synthetic construct
SYWIE

SEQ ID NO: 1294 - protein, 5 aa, synthetic construct
TYWIE

SEQ ID NO: 1295 - protein, 5 aa, synthetic construct
SYWIE

SEQ ID NO: 1296 - protein, 5 aa, synthetic construct
SYWIE

SEQ ID NO: 1297 - protein, 5 aa, synthetic construct
SYWIE

SEQ ID NO: 1298 - protein, 5 aa, synthetic construct
SYWIE

SEQ ID NO: 1299 - protein, 5 aa, synthetic construct
SYWIE

SEQ ID NO: 1300 - protein, 5 aa, synthetic construct
SYWIE

SEQ ID NO: 1301 - protein, 5 aa, synthetic construct
SYWIE

SEQ ID NO: 1302 - protein, 5 aa, synthetic construct
SYWIE

SEQ ID NO: 1303 - protein, 5 aa, synthetic construct
SYWIE

SEQ ID NO: 1304 - protein, 5 aa, synthetic construct
SYWIE

SEQ ID NO: 1305 - protein, 5 aa, synthetic construct
IYWIE

SEQ ID NO: 1306 - protein, 5 aa, synthetic construct
SYWIE

SEQ ID NO: 1307 - protein, 5 aa, synthetic construct
NYWIE

SEQ ID NO: 1308 - protein, 5 aa, synthetic construct
SYWIE

SEQ ID NO: 1309 - protein, 5 aa, synthetic construct
SYWIE

SEQ ID NO: 1310 - protein, 5 aa, synthetic construct
SYWIE

SEQ ID NO: 1311 - protein, 5 aa, synthetic construct
SYWIE

SEQ ID NO: 1312 - protein, 5 aa, synthetic construct
TYWIE

SEQ ID NO: 1313 - protein, 5 aa, synthetic construct
SYWIE

SEQ ID NO: 1314 - protein, 5 aa, synthetic construct
SYWIE

SEQ ID NO: 1315 - protein, 5 aa, synthetic construct
NYWIE

SEQ ID NO: 1316 - protein, 5 aa, synthetic construct
SYWIE

SEQ ID NO: 1317 - protein, 5 aa, synthetic construct
GYYMH

SEQ ID NO: 1318 - protein, 5 aa, synthetic construct
GYYMH

SEQ ID NO: 1319 - protein, 5 aa, synthetic construct
GYYMH

SEQ ID NO: 1320 - protein, 5 aa, synthetic construct
GYYMH

SEQ ID NO: 1321 - protein, 5 aa, synthetic construct
GYYMH

SEQ ID NO: 1322 - protein, 5 aa, synthetic construct
GYYMH

SEQ ID NO: 1323 - protein, 5 aa, synthetic construct
GYYMH

SEQ ID NO: 1324 - protein, 5 aa, synthetic construct
GYYMH

SEQ ID NO: 1325 - protein, 5 aa, synthetic construct
GYYMH

SEQ ID NO: 1326 - protein, 5 aa, synthetic construct
GFYMH

SEQ ID NO: 1327 - protein, 5 aa, synthetic construct
GYYMH

SEQ ID NO: 1328 - protein, 5 aa, synthetic construct
GYYMH

SEQ ID NO: 1329 - protein, 5 aa, synthetic construct
GYYMH

SEQ ID NO: 1330 - protein, 5 aa, synthetic construct
SYGVH

SEQ ID NO: 1331 - protein, 5 aa, synthetic construct
SYGVH

SEQ ID NO: 1332 - protein, 5 aa, synthetic construct
SYGVH

SEQ ID NO: 1333 - protein, 5 aa, synthetic construct
RYGVH

SEQ ID NO: 1334 - protein, 5 aa, synthetic construct
TYGVH

SEQ ID NO: 1335 - protein, 5 aa, synthetic construct
SYGVH

SEQ ID NO: 1336 - protein, 5 aa, synthetic construct
RYGVH

SEQ ID NO: 1337 - protein, 5 aa, synthetic construct
SYGVH

SEQ ID NO: 1338 - protein, 5 aa, synthetic construct
SYGVH

SEQ ID NO: 1339 - protein, 5 aa, synthetic construct
SYGVH

SEQ ID NO: 1340 - protein, 5 aa, synthetic construct
RYGVH

SEQ ID NO: 1341 - protein, 5 aa, synthetic construct
TYGVH

SEQ ID NO: 1342 - protein, 5 aa, synthetic construct
SYWMH

SEQ ID NO: 1343 - protein, 5 aa, synthetic construct
SYWMH

SEQ ID NO: 1344 - protein, 5 aa, synthetic construct
TYWMH

SEQ ID NO: 1345 - protein, 5 aa, synthetic construct
SYWMH

SEQ ID NO: 1346 - protein, 5 aa, synthetic construct
SYWMH

SEQ ID NO: 1347 - protein, 5 aa, synthetic construct
SYWMH

SEQ ID NO: 1348 - protein, 5 aa, synthetic construct
SYWMH

SEQ ID NO: 1349 - protein, 5 aa, synthetic construct
DYVIN

SEQ ID NO: 1350 - protein, 5 aa, synthetic construct
DYVIN

SEQ ID NO: 1351 - protein, 5 aa, synthetic construct
DYVIN

SEQ ID NO: 1352 - protein, 5 aa, synthetic construct
DYVIN

SEQ ID NO: 1353 - protein, 5 aa, synthetic construct
DYVIN

SEQ ID NO: 1354 - protein, 5 aa, synthetic construct
DYVIN

SEQ ID NO: 1355 - protein, 5 aa, synthetic construct
DYVIN

SEQ ID NO: 1356 - protein, 5 aa, synthetic construct
DYVIN

SEQ ID NO: 1357 - protein, 5 aa, synthetic construct
DYVIN

SEQ ID NO: 1358 - protein, 5 aa, synthetic construct
NYWMN

SEQ ID NO: 1359 - protein, 5 aa, synthetic construct
NYWMN

SEQ ID NO: 1360 - protein, 5 aa, synthetic construct
NYWMN

SEQ ID NO: 1361 - protein, 5 aa, synthetic construct
SYWMH

SEQ ID NO: 1362 - protein, 5 aa, synthetic construct
SYWMH

SEQ ID NO: 1363 - protein, 5 aa, synthetic construct
TYWMH

SEQ ID NO: 1364 - protein, 5 aa, synthetic construct
SYWMH

SEQ ID NO: 1365 - protein, 5 aa, synthetic construct
SYWMH

SEQ ID NO: 1366 - protein, 5 aa, synthetic construct
SYWIN

SEQ ID NO: 1367 - protein, 5 aa, synthetic construct
SYWIN

SEQ ID NO: 1368 - protein, 5 aa, synthetic construct
DYWIN

SEQ ID NO: 1369 - protein, 5 aa, synthetic construct
DYVIS

SEQ ID NO: 1370 - protein, 5 aa, synthetic construct
DYVIS

SEQ ID NO: 1371 - protein, 5 aa, synthetic construct
DYVIS

SEQ ID NO: 1372 - protein, 5 aa, synthetic construct
DYVIS

SEQ ID NO: 1373 - protein, 5 aa, synthetic construct
DYVIS

SEQ ID NO: 1374 - protein, 5 aa, synthetic construct
DYVIS

SEQ ID NO: 1375 - protein, 5 aa, synthetic construct
DYVIS

SEQ ID NO: 1376 - protein, 5 aa, synthetic construct
DYVIS

SEQ ID NO: 1377 - protein, 5 aa, synthetic construct
DYVIS

SEQ ID NO: 1378 - protein, 5 aa, synthetic construct
NYGVH

SEQ ID NO: 1379 - protein, 5 aa, synthetic construct
SYGVH

SEQ ID NO: 1380 - protein, 5 aa, synthetic construct
SYGVH

SEQ ID NO: 1381 - protein, 5 aa, synthetic construct
NYGVH

SEQ ID NO: 1382 - protein, 5 aa, synthetic construct
SYGVH

SEQ ID NO: 1383 - protein, 5 aa, synthetic construct
SYGVH

SEQ ID NO: 1384 - protein, 5 aa, synthetic construct
SYWMY

SEQ ID NO: 1385 - protein, 5 aa, synthetic construct
SYWMY

SEQ ID NO: 1386 - protein, 5 aa, synthetic construct
SYWMY

SEQ ID NO: 1387 - protein, 5 aa, synthetic construct
DYYMH

SEQ ID NO: 1388 - protein, 5 aa, synthetic construct
DYYIH

SEQ ID NO: 1389 - protein, 5 aa, synthetic construct
DYYMH

SEQ ID NO: 1390 - protein, 5 aa, synthetic construct
DYYMH

SEQ ID NO: 1391 - protein, 5 aa, synthetic construct
DYYIH

SEQ ID NO: 1392 - protein, 5 aa, synthetic construct
DYYMH

SEQ ID NO: 1393 - protein, 5 aa, synthetic construct
DTSLH

SEQ ID NO: 1394 - protein, 5 aa, synthetic construct
NYYVY

SEQ ID NO: 1395 - protein, 5 aa, synthetic construct
TYYIY

SEQ ID NO: 1396 - protein, 5 aa, synthetic construct
DYYMH

SEQ ID NO: 1397 - protein, 5 aa, synthetic construct
DYVIS

SEQ ID NO: 1398 - protein, 5 aa, synthetic construct
DYVIS

SEQ ID NO: 1399 - protein, 5 aa, synthetic construct
DYGMH

SEQ ID NO: 1400 - protein, 5 aa, synthetic construct
SYWMQ

SEQ ID NO: 1401 - protein, 5 aa, synthetic construct
SYWMQ

SEQ ID NO: 1402 - protein, 5 aa, synthetic construct
SYWMH

SEQ ID NO: 1403 - protein, 5 aa, synthetic construct
DYVIS

SEQ ID NO: 1404 - protein, 5 aa, synthetic construct
SYGMS

SEQ ID NO: 1405 - protein, 5 aa, synthetic construct
TSGMG

SEQ ID NO: 1406 - protein, 5 aa, synthetic construct
NYGMN

SEQ ID NO: 1407 - protein, 5 aa, synthetic construct
NYGMN

SEQ ID NO: 1408 - protein, 5 aa, synthetic construct
DYEMH

SEQ ID NO: 1409 - protein, 5 aa, synthetic construct
DYEMH

SEQ ID NO: 1410 - protein, 5 aa, synthetic construct
SYWMH

SEQ ID NO: 1411 - protein, 5 aa, synthetic construct
TSGMG

SEQ ID NO: 1412 - protein, 5 aa, synthetic construct
SSWMH

SEQ ID NO: 1413 - protein, 5 aa, synthetic construct
SSWMH

SEQ ID NO: 1414 - protein, 5 aa, synthetic construct
SYWMH

SEQ ID NO: 1415 - protein, 5 aa, synthetic construct
DYVIS

SEQ ID NO: 1416 - protein, 5 aa, synthetic construct
DYVIS

SEQ ID NO: 1417 - protein, 5 aa, synthetic construct
SYWMH

SEQ ID NO: 1418 - protein, 5 aa, synthetic construct
SYWMH

SEQ ID NO: 1419 - protein, 5 aa, synthetic construct
SYWMH

SEQ ID NO: 1420 - protein, 5 aa, synthetic construct
SYWMH

SEQ ID NO: 1421 - protein, 5 aa, synthetic construct
DYVIS

SEQ ID NO: 1422 - protein, 5 aa, synthetic construct
SYAMS

SEQ ID NO: 1423 - protein, 5 aa, synthetic construct
DYSMH

SEQ ID NO: 1424 - protein, 5 aa, synthetic construct
SYAMS

SEQ ID NO: 1425 - protein, 5 aa, synthetic construct
SYAMS

SEQ ID NO: 1426 - protein, 5 aa, synthetic construct
NYWMH

SEQ ID NO: 1427 - protein, 5 aa, synthetic construct
NYWMH

SEQ ID NO: 1428 - protein, 5 aa, synthetic construct
SSWMH

SEQ ID NO: 1429 - protein, 5 aa, synthetic construct
SSWMH

SEQ ID NO: 1430 - protein, 5 aa, synthetic construct
SYWMH

SEQ ID NO: 1431 - protein, 5 aa, synthetic construct
SYWMH

SEQ ID NO: 1432 - protein, 5 aa, synthetic construct
SYGVH

SEQ ID NO: 1433 - protein, 5 aa, synthetic construct
SYGVH

SEQ ID NO: 1434 - protein, 5 aa, synthetic construct
SYNMH

SEQ ID NO: 1435 - protein, 5 aa, synthetic construct
TSGMG

SEQ ID NO: 1436 - protein, 5 aa, synthetic construct
SYWMH

SEQ ID NO: 1437 - protein, 5 aa, synthetic construct
SYGMS

SEQ ID NO: 1438 - protein, 5 aa, synthetic construct
SYGMS

SEQ ID NO: 1439 - protein, 5 aa, synthetic construct
NYWMH

SEQ ID NO: 1440 - protein, 5 aa, synthetic construct
SYGMS

SEQ ID NO: 1441 - protein, 5 aa, synthetic construct
SYGMS

SEQ ID NO: 1442 - protein, 5 aa, synthetic construct
SYWMH

SEQ ID NO: 1443 - protein, 5 aa, synthetic construct
SYWMH

SEQ ID NO: 1444 - protein, 5 aa, synthetic construct
SYWMH

SEQ ID NO: 1445 - protein, 5 aa, synthetic construct
SYWMH

SEQ ID NO: 1446 - protein, 5 aa, synthetic construct
DYYMH

SEQ ID NO: 1447 - protein, 5 aa, synthetic construct
DYYMH

SEQ ID NO: 1448 - protein, 5 aa, synthetic construct
NYGMN

SEQ ID NO: 1449 - protein, 5 aa, synthetic construct
NYGMN

SEQ ID NO: 1450 - protein, 5 aa, synthetic construct
NYGMN

SEQ ID NO: 1451 - protein, 5 aa, synthetic construct
SYWMH

SEQ ID NO: 1452 - protein, 5 aa, synthetic construct
SYWMH

SEQ ID NO: 1453 - protein, 5 aa, synthetic construct
SYGVH

SEQ ID NO: 1454 - protein, 5 aa, synthetic construct
SYGVH

SEQ ID NO: 1455 - protein, 5 aa, synthetic construct
SYWMH

SEQ ID NO: 1456 - protein, 5 aa, synthetic construct
SYWMH

SEQ ID NO: 1457 - protein, 5 aa, synthetic construct
DYVIS

SEQ ID NO: 1458 - protein, 5 aa, synthetic construct
SYGMS

SEQ ID NO: 1459 - protein, 5 aa, synthetic construct
SYWMH

SEQ ID NO: 1460 - protein, 5 aa, synthetic construct
SYWMH

SEQ ID NO: 1461 - protein, 5 aa, synthetic construct
SYWMH

SEQ ID NO: 1462 - protein, 5 aa, synthetic construct
SYWMH

SEQ ID NO: 1463 - protein, 5 aa, synthetic construct
SYWMH

SEQ ID NO: 1464 - protein, 5 aa, synthetic construct
SYWMH

SEQ ID NO: 1465 - protein, 5 aa, synthetic construct
NYWMN

SEQ ID NO: 1466 - protein, 5 aa, synthetic construct
NYWMN

SEQ ID NO: 1467 - protein, 5 aa, synthetic construct
SYWMH

SEQ ID NO: 1468 - protein, 5 aa, synthetic construct
SYWMH

SEQ ID NO: 1469 - protein, 5 aa, synthetic construct
SYWMH

SEQ ID NO: 1470 - protein, 5 aa, synthetic construct
SYWMH

SEQ ID NO: 1471 - protein, 5 aa, synthetic construct
SYGMS

SEQ ID NO: 1472 - protein, 5 aa, synthetic construct
SYGMS

SEQ ID NO: 1473 - protein, 5 aa, synthetic construct
SYGMS

SEQ ID NO: 1474 - protein, 5 aa, synthetic construct
DTSLH

SEQ ID NO: 1475 - protein, 5 aa, synthetic construct
NYYMS

SEQ ID NO: 1476 - protein, 5 aa, synthetic construct
EYTMH

SEQ ID NO: 1477 - protein, 5 aa, synthetic construct
SYGVH

SEQ ID NO: 1478 - protein, 5 aa, synthetic construct
SYWIE

SEQ ID NO: 1479 - protein, 5 aa, synthetic construct
DYEMH

SEQ ID NO: 1480 - protein, 5 aa, synthetic construct
SYYMS

SEQ ID NO: 1481 - protein, 5 aa, synthetic construct
SYAMS

SEQ ID NO: 1482 - protein, 5 aa, synthetic construct
DTYMH

SEQ ID NO: 1483 - protein, 5 aa, synthetic construct
NYYMS

SEQ ID NO: 1484 - protein, 5 aa, synthetic construct
TYVMN

SEQ ID NO: 1485 - protein, 5 aa, synthetic construct
SGYYW

SEQ ID NO: 1486 - protein, 5 aa, synthetic construct
DYSMH

SEQ ID NO: 1487 - protein, 5 aa, synthetic construct
DYSMH

SEQ ID NO: 1488 - protein, 5 aa, synthetic construct
NYWMN

SEQ ID NO: 1489 - protein, 5 aa, synthetic construct
DYYMD

SEQ ID NO: 1490 - protein, 5 aa, synthetic construct
SYAMS

SEQ ID NO: 1491 - protein, 5 aa, synthetic construct
SYAMS

SEQ ID NO: 1492 - protein, 5 aa, synthetic construct
NYAMS

SEQ ID NO: 1493 - protein, 5 aa, synthetic construct
SYGVH

SEQ ID NO: 1494 - protein, 5 aa, synthetic construct
SDHAW

SEQ ID NO: 1495 - protein, 5 aa, synthetic construct
DYEMH

SEQ ID NO: 1496 - protein, 5 aa, synthetic construct
SGYYW

SEQ ID NO: 1497 - protein, 5 aa, synthetic construct
NYYMS

SEQ ID NO: 1498 - protein, 5 aa, synthetic construct
DYFMH

SEQ ID NO: 1499 - protein, 5 aa, synthetic construct
DYFMH

SEQ ID NO: 1500 - protein, 5 aa, synthetic construct
SYAMS

SEQ ID NO: 1501 - protein, 5 aa, synthetic construct
SYAMS

SEQ ID NO: 1502 - protein, 5 aa, synthetic construct
SYAMS

SEQ ID NO: 1503 - protein, 5 aa, synthetic construct
SGYYW

SEQ ID NO: 1504 - protein, 5 aa, synthetic construct
TYAMN

SEQ ID NO: 1505 - protein, 5 aa, synthetic construct
SYGMS

SEQ ID NO: 1506 - protein, 5 aa, synthetic construct
DYEMH

SEQ ID NO: 1507 - protein, 5 aa, synthetic construct
SYAMS

SEQ ID NO: 1508 - protein, 5 aa, synthetic construct
SYAMS

SEQ ID NO: 1509 - protein, 5 aa, synthetic construct
SYGVH

SEQ ID NO: 1510 - protein, 5 aa, synthetic construct
NYWMH

SEQ ID NO: 1511 - protein, 5 aa, synthetic construct
DYYMN

SEQ ID NO: 1512 - protein, 5 aa, synthetic construct
GYWIE

SEQ ID NO: 1513 - protein, 5 aa, synthetic construct
GYWIE

SEQ ID NO: 1514 - protein, 5 aa, synthetic construct
SYGVH

SEQ ID NO: 1515 - protein, 5 aa, synthetic construct
SYGVH

SEQ ID NO: 1516 - protein, 5 aa, synthetic construct
SYWMH

SEQ ID NO: 1517 - protein, 5 aa, synthetic construct
SYWMH

SEQ ID NO: 1518 - protein, 5 aa, synthetic construct
SGYYW

SEQ ID NO: 1519 - protein, 5 aa, synthetic construct
SYGVH

SEQ ID NO: 1520 - protein, 5 aa, synthetic construct
SYWIT

SEQ ID NO: 1521 - protein, 5 aa, synthetic construct
DYNMN

SEQ ID NO: 1522 - protein, 5 aa, synthetic construct
SYWMH

SEQ ID NO: 1523 - protein, 5 aa, synthetic construct
DYNMN

SEQ ID NO: 1524 - protein, 5 aa, synthetic construct
SYGVH

SEQ ID NO: 1525 - protein, 5 aa, synthetic construct
SYGVH

SEQ ID NO: 1526 - protein, 5 aa, synthetic construct
SYWMH

SEQ ID NO: 1527 - protein, 5 aa, synthetic construct
NTYMH

SEQ ID NO: 1528 - protein, 5 aa, synthetic construct
SYWMH

SEQ ID NO: 1529 - protein, 5 aa, synthetic construct
DYYMN

SEQ ID NO: 1530 - protein, 5 aa, synthetic construct
SYGIS

SEQ ID NO: 1531 - protein, 5 aa, synthetic construct
SYGVH

SEQ ID NO: 1532 - protein, 5 aa, synthetic construct
DYNMN

SEQ ID NO: 1533 - protein, 5 aa, synthetic construct
DYEMH

SEQ ID NO: 1534 - protein, 5 aa, synthetic construct
SYWMH

SEQ ID NO: 1535 - protein, 5 aa, synthetic construct
GYWMY

SEQ ID NO: 1536-1793 - skipped (258 entries)

SEQ ID NO: 1794 - protein, 17 aa, synthetic construct
EILPGSGSTNYNEKFKG

SEQ ID NO: 1795 - protein, 17 aa, synthetic construct
EILPGSGSTNYIEKFKG

SEQ ID NO: 1796 - protein, 17 aa, synthetic construct
EILPGSDSTSYNEKFKG

SEQ ID NO: 1797 - protein, 17 aa, synthetic construct
EILPGSGSTNYNEKVKG

SEQ ID NO: 1798 - protein, 17 aa, synthetic construct
EIFPGSGHTSFNEKFKG

SEQ ID NO: 1799 - protein, 17 aa, synthetic construct
EILPGSGSTNYNEKFKG

SEQ ID NO: 1800 - protein, 17 aa, synthetic construct
EILPGSGSTNYNEKFKG

SEQ ID NO: 1801 - protein, 17 aa, synthetic construct
EILPGSGSTSYNEKFKG

SEQ ID NO: 1802 - protein, 17 aa, synthetic construct
EILPGSGSTSYNEKFKG

SEQ ID NO: 1803 - protein, 17 aa, synthetic construct
EILPGSGYTSYIEQFKG

SEQ ID NO: 1804 - protein, 17 aa, synthetic construct
EILPGSGSTSYNEKFKD

SEQ ID NO: 1805 - protein, 17 aa, synthetic construct
EILPGSGSTSYNEKFKG

SEQ ID NO: 1806 - protein, 17 aa, synthetic construct
EVLPGSGSTSYNEKFKG

SEQ ID NO: 1807 - protein, 17 aa, synthetic construct
EISPGSGSTNYNEKFKG

SEQ ID NO: 1808 - protein, 17 aa, synthetic construct
EILPGSGTPNYNEKFKG

SEQ ID NO: 1809 - protein, 17 aa, synthetic construct
EILPGSGSTSCNEKFKG

SEQ ID NO: 1810 - protein, 17 aa, synthetic construct
EILPGSGRTSYIEKFKG

SEQ ID NO: 1811 - protein, 17 aa, synthetic construct
EILPGSGRTSYIEKFKG

SEQ ID NO: 1812 - protein, 17 aa, synthetic construct
EILPGSGSTSYNEKFKD

SEQ ID NO: 1813 - protein, 17 aa, synthetic construct
EVLPGSGSTSYNEKFKG

SEQ ID NO: 1814 - protein, 17 aa, synthetic construct
EILPGSGRTSYIEKFKG

SEQ ID NO: 1815 - protein, 17 aa, synthetic construct
EVLPGSGSTSYNEKFKG

SEQ ID NO: 1816 - protein, 17 aa, synthetic construct
EILPGSGRTSYIEKFKG

SEQ ID NO: 1817 - protein, 17 aa, synthetic construct
EILPGSGSTNYNEKFKG

SEQ ID NO: 1818 - protein, 17 aa, synthetic construct
EILPGSDSTSYNEKFKG

SEQ ID NO: 1819 - protein, 17 aa, synthetic construct
EILPGSGSTNYNEKVKG

SEQ ID NO: 1820 - protein, 17 aa, synthetic construct
EIFPGSGHTSFNEKFKG

SEQ ID NO: 1821 - protein, 17 aa, synthetic construct
EILPGSGSTSYNEKFKG

SEQ ID NO: 1822 - protein, 17 aa, synthetic construct
EILPGSGSTSYNEKFKG

SEQ ID NO: 1823 - protein, 17 aa, synthetic construct
EILPGSGYTSYIEQFKG

SEQ ID NO: 1824 - protein, 17 aa, synthetic construct
EILPGSGSTSYNEKFKG

SEQ ID NO: 1825 - protein, 17 aa, synthetic construct
EISPGSGSTNYNEKFKG

SEQ ID NO: 1826 - protein, 17 aa, synthetic construct
EILPGSGTPNYNEKFKG

SEQ ID NO: 1827 - protein, 17 aa, synthetic construct
EILPGSGSTSCNEKFKG

SEQ ID NO: 1828 - protein, 17 aa, synthetic construct
EILPGSGRTSYIEKFKG

SEQ ID NO: 1829 - protein, 17 aa, synthetic construct
EILPGSGSTSYNEKFKG

SEQ ID NO: 1830 - protein, 17 aa, synthetic construct
EILPGSGSTSYNEKFKG

SEQ ID NO: 1831 - protein, 17 aa, synthetic construct
YISSYNGATSYNQKFKG

SEQ ID NO: 1832 - protein, 17 aa, synthetic construct
YISSYNGVTGYNQKFKG

SEQ ID NO: 1833 - protein, 17 aa, synthetic construct
YISSYNGVTSYNQKFKG

SEQ ID NO: 1834 - protein, 17 aa, synthetic construct
YISSYNGVTGYNQKFKG

SEQ ID NO: 1835 - protein, 17 aa, synthetic construct
YISSYNGANGYNQKFKG

SEQ ID NO: 1836 - protein, 17 aa, synthetic construct
YISSYNGVTGYNQKFKG

SEQ ID NO: 1837 - protein, 17 aa, synthetic construct
YISSYNGVTGYNQKFKG

SEQ ID NO: 1838 - protein, 17 aa, synthetic construct
YISSYNGVTGYNQKFKG

SEQ ID NO: 1839 - protein, 17 aa, synthetic construct
YISSYNGVTGYNQKFKG

SEQ ID NO: 1840 - protein, 17 aa, synthetic construct
YISSYNGATGYNQKFKG

SEQ ID NO: 1841 - protein, 17 aa, synthetic construct
YISSYNGATGYNQKFKG

SEQ ID NO: 1842 - protein, 17 aa, synthetic construct
YISSYNGVTGYNQKFKG

SEQ ID NO: 1843 - protein, 17 aa, synthetic construct
YISSYNGATSYNQKFKG

SEQ ID NO: 1844 - protein, 16 aa, synthetic construct
VIWRGGSTDYNAAFMS

SEQ ID NO: 1845 - protein, 16 aa, synthetic construct
VIWRGGSTDYNAAFMS

SEQ ID NO: 1846 - protein, 16 aa, synthetic construct
VIWRGGSTDNNAAFMS

SEQ ID NO: 1847 - protein, 16 aa, synthetic construct
VIWRGGSTDHNAAFMS

SEQ ID NO: 1848 - protein, 16 aa, synthetic construct
VIWRGGSTDYNAAFMS

SEQ ID NO: 1849 - protein, 16 aa, synthetic construct
VIWRGGSTDYNAAFMS

SEQ ID NO: 1850 - protein, 16 aa, synthetic construct
VIWRGGSTDHNAAFMS

SEQ ID NO: 1851 - protein, 16 aa, synthetic construct
VIWRGGSTDYNAAFMS

SEQ ID NO: 1852 - protein, 16 aa, synthetic construct
VIWRGGSTDYNAAFMS

SEQ ID NO: 1853 - protein, 16 aa, synthetic construct
VIWRGGSTDNNAAFMS

SEQ ID NO: 1854 - protein, 16 aa, synthetic construct
VIWRGGSTDHNAAFMS

SEQ ID NO: 1855 - protein, 16 aa, synthetic construct
VIWRGGSTDYNAAFMS

SEQ ID NO: 1856 - protein, 17 aa, synthetic construct
MIHPNSGSTNYNEKFKS

SEQ ID NO: 1857 - protein, 17 aa, synthetic construct
MIHPNSGSTNYNEKFKS

SEQ ID NO: 1858 - protein, 17 aa, synthetic construct
MIHPNSDNTNYNEKFKS

SEQ ID NO: 1859 - protein, 17 aa, synthetic construct
MIHPNSGTTNYNEKFKS

SEQ ID NO: 1860 - protein, 17 aa, synthetic construct
MIHPNSGNTNYNEKFKS

SEQ ID NO: 1861 - protein, 17 aa, synthetic construct
MIHPNSGSTNYNEKFKS

SEQ ID NO: 1862 - protein, 17 aa, synthetic construct
MIHPNSGTTNYNEKFKS

SEQ ID NO: 1863 - protein, 17 aa, synthetic construct
EIYPGSGSTYYNEKFKG

SEQ ID NO: 1864 - protein, 17 aa, synthetic construct
EIYPGSGSSYYNEKFKG

SEQ ID NO: 1865 - protein, 17 aa, synthetic construct
EIYPGSGSSYYNEKFRG

SEQ ID NO: 1866 - protein, 17 aa, synthetic construct
EIYPGSGSSYYNEKFKG

SEQ ID NO: 1867 - protein, 17 aa, synthetic construct
EIYPGSGSSYYNEKFKG

SEQ ID NO: 1868 - protein, 17 aa, synthetic construct
EIYPGSGSTYYNEKFKG

SEQ ID NO: 1869 - protein, 17 aa, synthetic construct
EIYPGSGSSYYNEKFKG

SEQ ID NO: 1870 - protein, 17 aa, synthetic construct
EIYPGSGSSYYNEKFRG

SEQ ID NO: 1871 - protein, 17 aa, synthetic construct
EIYPGSGSSYYNEKFKG

SEQ ID NO: 1872 - protein, 17 aa, synthetic construct
LIDPSDSETHYNQVFKD

SEQ ID NO: 1873 - protein, 17 aa, synthetic construct
MIDPSDSETHYNQMFKD

SEQ ID NO: 1874 - protein, 17 aa, synthetic construct
MIDPSDSETHFNQMFKD

SEQ ID NO: 1875 - protein, 17 aa, synthetic construct
MIHPNSGSTNYNEKFKS

SEQ ID NO: 1876 - protein, 17 aa, synthetic construct
MIHPNSDSTNYNEKFKS

SEQ ID NO: 1877 - protein, 17 aa, synthetic construct
MIHPNSGSTNYNEKFKS

SEQ ID NO: 1878 - protein, 17 aa, synthetic construct
MIHPNSGSPNYNEKFKS

SEQ ID NO: 1879 - protein, 17 aa, synthetic construct
MIHPNSGSPNYNEKFKS

SEQ ID NO: 1880 - protein, 17 aa, synthetic construct
NIYPSDSYTNYNQKFKD

SEQ ID NO: 1881 - protein, 17 aa, synthetic construct
NIYPSDSYTNYNQKFKD

SEQ ID NO: 1882 - protein, 17 aa, synthetic construct
NIYPSDSYTNYNQKFKD

SEQ ID NO: 1883 - protein, 17 aa, synthetic construct
EIYPGSGSSYYNEKFKG

SEQ ID NO: 1884 - protein, 17 aa, synthetic construct
EIYPGSGSNYYNEKFKG

SEQ ID NO: 1885 - protein, 17 aa, synthetic construct
EIYPGSGSSYYNEKFKG

SEQ ID NO: 1886 - protein, 17 aa, synthetic construct
EIYPGSGSSYYNEKFKG

SEQ ID NO: 1887 - protein, 17 aa, synthetic construct
EIYPGSGSSYYNEKFKG

SEQ ID NO: 1888 - protein, 17 aa, synthetic construct
EIYPGSGSNYYNEKFKG

SEQ ID NO: 1889 - protein, 17 aa, synthetic construct
EIYPGSGSSYYNEKFKG

SEQ ID NO: 1890 - protein, 17 aa, synthetic construct
EIYPGSGSSYYNEKFKG

SEQ ID NO: 1891 - protein, 17 aa, synthetic construct
EIYPGSGSSYYNEKFKG

SEQ ID NO: 1892 - protein, 16 aa, synthetic construct
VVWAGGITNYNWALMS

SEQ ID NO: 1893 - protein, 16 aa, synthetic construct
VLWAGGITNYNSALMS

SEQ ID NO: 1894 - protein, 16 aa, synthetic construct
VIWAGGTTNYNSALMS

SEQ ID NO: 1895 - protein, 16 aa, synthetic construct
VVWAGGITNYNWALMS

SEQ ID NO: 1896 - protein, 16 aa, synthetic construct
VLWAGGITNYNSALMS

SEQ ID NO: 1897 - protein, 16 aa, synthetic construct
VIWAGGTTNYNSALMS

SEQ ID NO: 1898 - protein, 17 aa, synthetic construct
MIDPSDSETRLNQKFKD

SEQ ID NO: 1899 - protein, 17 aa, synthetic construct
MIDPSDSETRLNQKFKD

SEQ ID NO: 1900 - protein, 17 aa, synthetic construct
MIDPSDSETRLNQKFKD

SEQ ID NO: 1901 - protein, 17 aa, synthetic construct
WIDPENGDTEYAPKFQG

SEQ ID NO: 1902 - protein, 17 aa, synthetic construct
WIDPENGDTEYAPKFQG

SEQ ID NO: 1903 - protein, 17 aa, synthetic construct
WIDPENGDTEYAPKFQG

SEQ ID NO: 1904 - protein, 17 aa, synthetic construct
WIDPENGDTEYAPKFQG

SEQ ID NO: 1905 - protein, 17 aa, synthetic construct
WIDPENGDTEYAPKFQG

SEQ ID NO: 1906 - protein, 17 aa, synthetic construct
WIDPENGDTEYAPKFQG

SEQ ID NO: 1907 - protein, 17 aa, synthetic construct
RIDPANGNTKYDPKFQG

SEQ ID NO: 1908 - protein, 17 aa, synthetic construct
EINPSNGDTNFNEKFKS

SEQ ID NO: 1909 - protein, 17 aa, synthetic construct
EINPSNGGTNFNEKFKS

SEQ ID NO: 1910 - protein, 17 aa, synthetic construct
RIDPEDGDTEYAPKFQG

SEQ ID NO: 1911 - protein, 17 aa, synthetic construct
EIYPGSGSTYYNEKFKG

SEQ ID NO: 1912 - protein, 17 aa, synthetic construct
EIYPGSGSTYYNEKFKG

SEQ ID NO: 1913 - protein, 17 aa, synthetic construct
VISTYYGDASYNQKFKG

SEQ ID NO: 1914 - protein, 17 aa, synthetic construct
EIDPSDSYTNYNQKFKG

SEQ ID NO: 1915 - protein, 17 aa, synthetic construct
EIDPSDSYTNYNQKFKG

SEQ ID NO: 1916 - protein, 17 aa, synthetic construct
RIHPSDSDTNYNQKFKG

SEQ ID NO: 1917 - protein, 17 aa, synthetic construct
EIYPGSGSTYYNEKFKG

SEQ ID NO: 1918 - protein, 17 aa, synthetic construct
TISSGGSYTYYPDSVKG

SEQ ID NO: 1919 - protein, 15 aa, synthetic construct
SIWNNDNYYNPSLKS

SEQ ID NO: 1920 - protein, 17 aa, synthetic construct
WINTYTGEPTYADDFKG

SEQ ID NO: 1921 - protein, 17 aa, synthetic construct
WINTYTGEPTYADDFKG

SEQ ID NO: 1922 - protein, 17 aa, synthetic construct
AIDPETGGTAYNQKFKV

SEQ ID NO: 1923 - protein, 17 aa, synthetic construct
AIDPETGGTAYNQKFKV

SEQ ID NO: 1924 - protein, 17 aa, synthetic construct
EIDPSDSYTNYNQKFKG

SEQ ID NO: 1925 - protein, 16 aa, synthetic construct
HIYWDDDKRYNPSLKS

SEQ ID NO: 1926 - protein, 17 aa, synthetic construct
EIHPNSGNTNYNEKFKG

SEQ ID NO: 1927 - protein, 17 aa, synthetic construct
EIHPNSGNTNYNEKFKG

SEQ ID NO: 1928 - protein, 17 aa, synthetic construct
MIHPNSGSTNYNEKFKS

SEQ ID NO: 1929 - protein, 17 aa, synthetic construct
EIYPGSGSNYYNEKFKG

SEQ ID NO: 1930 - protein, 17 aa, synthetic construct
EIYPGSGSNYYNEKFKG

SEQ ID NO: 1931 - protein, 17 aa, synthetic construct
MIHPNSGSTNYNEKFKS

SEQ ID NO: 1932 - protein, 17 aa, synthetic construct
AIYPGNSDTTYNQKFKG

SEQ ID NO: 1933 - protein, 17 aa, synthetic construct
AIYPGNSDTTYNQKFKG

SEQ ID NO: 1934 - protein, 17 aa, synthetic construct
MIHPNSGSTNYNEKFKS

SEQ ID NO: 1935 - protein, 17 aa, synthetic construct
EIYPGSGSTYYNEKFKG

SEQ ID NO: 1936 - protein, 17 aa, synthetic construct
TISDGGSYTYYPDNVKG

SEQ ID NO: 1937 - protein, 17 aa, synthetic construct
WINTETGEPTYADDFKG

SEQ ID NO: 1938 - protein, 17 aa, synthetic construct
TISSGGSYTYYPDSVKG

SEQ ID NO: 1939 - protein, 17 aa, synthetic construct
TISSGGSYTYYPDSVKG

SEQ ID NO: 1940 - protein, 17 aa, synthetic construct
MIDPSDSETRLNQQFKD

SEQ ID NO: 1941 - protein, 17 aa, synthetic construct
MIDPSDSETRLNQQFKD

SEQ ID NO: 1942 - protein, 17 aa, synthetic construct
EIHPNSGNTNYNEKNKG

SEQ ID NO: 1943 - protein, 17 aa, synthetic construct
EIHPNSGNTNYNEKNKG

SEQ ID NO: 1944 - protein, 17 aa, synthetic construct
MIHPNSGSTNYNEKFKS

SEQ ID NO: 1945 - protein, 17 aa, synthetic construct
MIHPNSGSTNYNEKFKS

SEQ ID NO: 1946 - protein, 16 aa, synthetic construct
VIWSGGSTDYNAAFIS

SEQ ID NO: 1947 - protein, 16 aa, synthetic construct
VIWSGGSTDYNAAFIS

SEQ ID NO: 1948 - protein, 17 aa, synthetic construct
ALYSGNGDTSYNQKFKG

SEQ ID NO: 1949 - protein, 16 aa, synthetic construct
HIYWDDDKRYNPSLKS

SEQ ID NO: 1950 - protein, 17 aa, synthetic construct
MIHPNSGSTNYNEKFKS

SEQ ID NO: 1951 - protein, 17 aa, synthetic construct
TISSGGSYTYYPDSVKG

SEQ ID NO: 1952 - protein, 17 aa, synthetic construct
TISSGGSYTYYPDSVKG

SEQ ID NO: 1953 - protein, 17 aa, synthetic construct
MIHPNSGTTNYNEKFKS

SEQ ID NO: 1954 - protein, 17 aa, synthetic construct
TISSGGSYTYYPDSVKG

SEQ ID NO: 1955 - protein, 17 aa, synthetic construct
TISSGGSYTYYPDSVKG

SEQ ID NO: 1956 - protein, 17 aa, synthetic construct
MIHPNSGSTNYNEKFKS

SEQ ID NO: 1957 - protein, 17 aa, synthetic construct
MIHPNSGSTNYNEKFKS

SEQ ID NO: 1958 - protein, 17 aa, synthetic construct
NIDPSDSETHYNQKFKD

SEQ ID NO: 1959 - protein, 17 aa, synthetic construct
NIDPSDSETHYNQKFKD

SEQ ID NO: 1960 - protein, 17 aa, synthetic construct
RIDPEDGETKYAPKFQG

SEQ ID NO: 1961 - protein, 17 aa, synthetic construct
RIDPEDGETKYAPKFQG

SEQ ID NO: 1962 - protein, 17 aa, synthetic construct
WINTNTGEPTYAEEFKG

SEQ ID NO: 1963 - protein, 17 aa, synthetic construct
WINTNTGEPTYAEEFKG

SEQ ID NO: 1964 - protein, 17 aa, synthetic construct
WINTNTGEPTYAEEFKG

SEQ ID NO: 1965 - protein, 17 aa, synthetic construct
YINPSSGYTKYNQKFKD

SEQ ID NO: 1966 - protein, 17 aa, synthetic construct
YINPSSGYTKYNQKFKD

SEQ ID NO: 1967 - protein, 16 aa, synthetic construct
VIWAGGSTNYNSALMS

SEQ ID NO: 1968 - protein, 16 aa, synthetic construct
VIWAGGSTNYNSALMS

SEQ ID NO: 1969 - protein, 17 aa, synthetic construct
NIDPSDSETHYNQKFKD

SEQ ID NO: 1970 - protein, 17 aa, synthetic construct
NIDPSDSETHYNQKFKD

SEQ ID NO: 1971 - protein, 17 aa, synthetic construct
EIYPGSGSAYYNEKFKG

SEQ ID NO: 1972 - protein, 17 aa, synthetic construct
TISSGGSYTYYPDSVKG

SEQ ID NO: 1973 - protein, 17 aa, synthetic construct
MIHPNSGSTNYNEKFKS

SEQ ID NO: 1974 - protein, 17 aa, synthetic construct
MIHPNSGSTNYNEKFKS

SEQ ID NO: 1975 - protein, 17 aa, synthetic construct
MIHPNSGSTNYNEKFKS

SEQ ID NO: 1976 - protein, 17 aa, synthetic construct
MIHPNSGSTNYNEKFKS

SEQ ID NO: 1977 - protein, 17 aa, synthetic construct
MIHPNSGSTNYNEKFKS

SEQ ID NO: 1978 - protein, 17 aa, synthetic construct
MIHPNSGSTNYNEKFKS

SEQ ID NO: 1979 - protein, 17 aa, synthetic construct
MIDPSDSETHYNQMFKD

SEQ ID NO: 1980 - protein, 17 aa, synthetic construct
MIDPSDSETHFNQMFKD

SEQ ID NO: 1981 - protein, 17 aa, synthetic construct
MIHPNSGSTNYNEKFKS

SEQ ID NO: 1982 - protein, 17 aa, synthetic construct
MIHPNSGSTNYNEKFKS

SEQ ID NO: 1983 - protein, 17 aa, synthetic construct
MIHPNSGSTNYNEKFKS

SEQ ID NO: 1984 - protein, 17 aa, synthetic construct
MIHPNSGSTNYNEKFKS

SEQ ID NO: 1985 - protein, 17 aa, synthetic construct
TISSGGSYTYYPDSVKG

SEQ ID NO: 1986 - protein, 17 aa, synthetic construct
TISSGGSYTYYPDSVKG

SEQ ID NO: 1987 - protein, 17 aa, synthetic construct
TISSGGSYTYYPDSVKG

SEQ ID NO: 1988 - protein, 17 aa, synthetic construct
RIDPANGNTKYDPKFQG

SEQ ID NO: 1989 - protein, 17 aa, synthetic construct
VINSNGGSTYYPDTVKG

SEQ ID NO: 1990 - protein, 17 aa, synthetic construct
GIYPNNGGTSYNQKFKG

SEQ ID NO: 1991 - protein, 16 aa, synthetic construct
VIWSGGSTDYNAAFIS

SEQ ID NO: 1992 - protein, 17 aa, synthetic construct
EILPGSGSTNYNEKFKG

SEQ ID NO: 1993 - protein, 17 aa, synthetic construct
AIDPETGGTAYNQKFKG

SEQ ID NO: 1994 - protein, 17 aa, synthetic construct
VINSNGGSTFYPDTVKG

SEQ ID NO: 1995 - protein, 16 aa, synthetic construct
AISSGGSTYYPDSVKG

SEQ ID NO: 1996 - protein, 17 aa, synthetic construct
RIDPANGNTKYDPKFQG

SEQ ID NO: 1997 - protein, 17 aa, synthetic construct
VINSNGGSTYYPDTVKG

SEQ ID NO: 1998 - protein, 19 aa, synthetic construct
RIRSKSDNYATYYADSVKD

SEQ ID NO: 1999 - protein, 16 aa, synthetic construct
YISYDGSNNYNPSLKN

SEQ ID NO: 2000 - protein, 17 aa, synthetic construct
WINTETGEPTYADDFKG

SEQ ID NO: 2001 - protein, 17 aa, synthetic construct
WINTETGEPTYADDFKG

SEQ ID NO: 2002 - protein, 17 aa, synthetic construct
RIDPYDSETHYNQKFKD

SEQ ID NO: 2003 - protein, 17 aa, synthetic construct
RVNPYNGGTSYNQKFKG

SEQ ID NO: 2004 - protein, 16 aa, synthetic construct
SISSGGSTYYPDSVKG

SEQ ID NO: 2005 - protein, 17 aa, synthetic construct
TISSGGSYTYYPDSVKG

SEQ ID NO: 2006 - protein, 16 aa, synthetic construct
SISSGGTTYYPDSVKG

SEQ ID NO: 2007 - protein, 16 aa, synthetic construct
VIWAGGSTNYNSALMS

SEQ ID NO: 2008 - protein, 16 aa, synthetic construct
YISYSGSTTYNPSLKS

SEQ ID NO: 2009 - protein, 17 aa, synthetic construct
AIDPETGGTAYNQKFKG

SEQ ID NO: 2010 - protein, 16 aa, synthetic construct
YISYDGSNDYNPSLKN

SEQ ID NO: 2011 - protein, 17 aa, synthetic construct
VINSNGGSTYYPDTVKG

SEQ ID NO: 2012 - protein, 17 aa, synthetic construct
WIDPETDNTIYDPKFQG

SEQ ID NO: 2013 - protein, 17 aa, synthetic construct
WIDPETDNTIYDPKFQG

SEQ ID NO: 2014 - protein, 17 aa, synthetic construct
TISSGGSYTYYPDSVKG

SEQ ID NO: 2015 - protein, 17 aa, synthetic construct
TISSGGSYTYYPDSVKG

SEQ ID NO: 2016 - protein, 17 aa, synthetic construct
TISNGGSYTYYPDSVKG

SEQ ID NO: 2017 - protein, 16 aa, synthetic construct
YMSYDGSNNYNPSLKN

SEQ ID NO: 2018 - protein, 19 aa, synthetic construct
RIRSKSNNYATYYADSVKD

SEQ ID NO: 2019 - protein, 17 aa, synthetic construct
TISSGGSYTYYPDSVKG

SEQ ID NO: 2020 - protein, 17 aa, synthetic construct
AIDPETGGTAYNQKFKG

SEQ ID NO: 2021 - protein, 17 aa, synthetic construct
TISSGGSYTYYPDSVKG

SEQ ID NO: 2022 - protein, 17 aa, synthetic construct
TISSGGSYTYYPDSVKG

SEQ ID NO: 2023 - protein, 16 aa, synthetic construct
VIWSGGSTDYNAAFIS

SEQ ID NO: 2024 - protein, 17 aa, synthetic construct
MIHPNSGSTNYNEKFKS

SEQ ID NO: 2025 - protein, 17 aa, synthetic construct
DINPNNGGTSYNQKFKG

SEQ ID NO: 2026 - protein, 17 aa, synthetic construct
EILPGSGSTNYNEKFKG

SEQ ID NO: 2027 - protein, 17 aa, synthetic construct
EILPGSGSTNYNEKFKG

SEQ ID NO: 2028 - protein, 16 aa, synthetic construct
VIWSGGSTDYNAAFIS

SEQ ID NO: 2029 - protein, 16 aa, synthetic construct
VIWSGGSTDYNAAFIS

SEQ ID NO: 2030 - protein, 17 aa, synthetic construct
EIDPSDSYTNYNQKFKG

SEQ ID NO: 2031 - protein, 17 aa, synthetic construct
EIDPSDSYTNYNQKFKG

SEQ ID NO: 2032 - protein, 16 aa, synthetic construct
YISYDGSNNYNPSLKN

SEQ ID NO: 2033 - protein, 16 aa, synthetic construct
VIWSGGSTDYNAAFIS

SEQ ID NO: 2034 - protein, 17 aa, synthetic construct
DIYPGSGSTNYNEKFKS

SEQ ID NO: 2035 - protein, 17 aa, synthetic construct
VINPNYGTTSYNQKFKG

SEQ ID NO: 2036 - protein, 17 aa, synthetic construct
EIDPSDSYTNYNQKFKG

SEQ ID NO: 2037 - protein, 17 aa, synthetic construct
VINPNYGTTSYNQKFKG

SEQ ID NO: 2038 - protein, 16 aa, synthetic construct
VIWRGGSTDYNAAFMS

SEQ ID NO: 2039 - protein, 16 aa, synthetic construct
VIWSGGSTDYNAAFIS

SEQ ID NO: 2040 - protein, 17 aa, synthetic construct
EIDPSDSYTNYNQKFKG

SEQ ID NO: 2041 - protein, 17 aa, synthetic construct
RIDPANGNTKYAPKFQG

SEQ ID NO: 2042 - protein, 17 aa, synthetic construct
NIDPSDSETHYNQKFKD

SEQ ID NO: 2043 - protein, 17 aa, synthetic construct
DINPNNGGTSYNQKFKG

SEQ ID NO: 2044 - protein, 17 aa, synthetic construct
EIYPRSGNTYYNEKFKG

SEQ ID NO: 2045 - protein, 16 aa, synthetic construct
VIWSGGSTDYNAAFIS

SEQ ID NO: 2046 - protein, 17 aa, synthetic construct
VINPNYGTTSYNQKFKG

SEQ ID NO: 2047 - protein, 17 aa, synthetic construct
AIDPETGGTAYNQKFKG

SEQ ID NO: 2048 - protein, 17 aa, synthetic construct
VIDPSDSYTNYNQKFKG

SEQ ID NO: 2049 - protein, 17 aa, synthetic construct
AISPGGGSTYYPDSVKG

SEQ ID NO: 2050-2307 - skipped (258 entries)

SEQ ID NO: 2308 - protein, 11 aa, synthetic construct
RAYGYDGGFDY

SEQ ID NO: 2309 - protein, 11 aa, synthetic construct
RAYGYDEGFDY

SEQ ID NO: 2310 - protein, 11 aa, synthetic construct
RAYGYDEGFDY

SEQ ID NO: 2311 - protein, 11 aa, synthetic construct
RAYGYDGGFDY

SEQ ID NO: 2312 - protein, 11 aa, synthetic construct
RGYGYDEGFDY

SEQ ID NO: 2313 - protein, 11 aa, synthetic construct
RGYGYDEGFDY

SEQ ID NO: 2314 - protein, 11 aa, synthetic construct
RGYGYDEGFDY

SEQ ID NO: 2315 - protein, 11 aa, synthetic construct
RGYGYDEGFDY

SEQ ID NO: 2316 - protein, 11 aa, synthetic construct
RGYGYDEGFDY

SEQ ID NO: 2317 - protein, 11 aa, synthetic construct
RGYGYDEGFDY

SEQ ID NO: 2318 - protein, 11 aa, synthetic construct
RAYGYDEGFDY

SEQ ID NO: 2319 - protein, 11 aa, synthetic construct
RGYGYDEGFDY

SEQ ID NO: 2320 - protein, 11 aa, synthetic construct
RAYGYDEGFDY

SEQ ID NO: 2321 - protein, 11 aa, synthetic construct
RGYGYDEGFDY

SEQ ID NO: 2322 - protein, 11 aa, synthetic construct
RAYGYDAGFDY

SEQ ID NO: 2323 - protein, 11 aa, synthetic construct
RGYGYDEGFDY

SEQ ID NO: 2324 - protein, 11 aa, synthetic construct
RGYGYDEGFDY

SEQ ID NO: 2325 - protein, 11 aa, synthetic construct
RGYGYDEGFDY

SEQ ID NO: 2326 - protein, 11 aa, synthetic construct
RAYGYDEGFDY

SEQ ID NO: 2327 - protein, 11 aa, synthetic construct
RAYGYDEGFDY

SEQ ID NO: 2328 - protein, 11 aa, synthetic construct
RGYGYDEGFDY

SEQ ID NO: 2329 - protein, 11 aa, synthetic construct
RAYGYDEGFDY

SEQ ID NO: 2330 - protein, 11 aa, synthetic construct
RGYGYDEGFDY

SEQ ID NO: 2331 - protein, 11 aa, synthetic construct
RAYGYDGGFDY

SEQ ID NO: 2332 - protein, 11 aa, synthetic construct
RAYGYDEGFDY

SEQ ID NO: 2333 - protein, 11 aa, synthetic construct
RAYGYDGGFDY

SEQ ID NO: 2334 - protein, 11 aa, synthetic construct
RGYGYDEGFDY

SEQ ID NO: 2335 - protein, 11 aa, synthetic construct
RGYGYDEGFDY

SEQ ID NO: 2336 - protein, 11 aa, synthetic construct
RGYGYDEGFDY

SEQ ID NO: 2337 - protein, 11 aa, synthetic construct
RGYGYDEGFDY

SEQ ID NO: 2338 - protein, 11 aa, synthetic construct
RGYGYDEGFDY

SEQ ID NO: 2339 - protein, 11 aa, synthetic construct
RGYGYDEGFDY

SEQ ID NO: 2340 - protein, 11 aa, synthetic construct
RAYGYDAGFDY

SEQ ID NO: 2341 - protein, 11 aa, synthetic construct
RGYGYDEGFDY

SEQ ID NO: 2342 - protein, 11 aa, synthetic construct
RGYGYDEGFDY

SEQ ID NO: 2343 - protein, 11 aa, synthetic construct
RGYGYDEGFDY

SEQ ID NO: 2344 - protein, 11 aa, synthetic construct
RGYGYDEGFDY

SEQ ID NO: 2345 - protein, 9 aa, synthetic construct
GRYGEYFDY

SEQ ID NO: 2346 - protein, 9 aa, synthetic construct
GRYGDYFDY

SEQ ID NO: 2347 - protein, 9 aa, synthetic construct
GRYGDYFDY

SEQ ID NO: 2348 - protein, 9 aa, synthetic construct
GRYGDYFDY

SEQ ID NO: 2349 - protein, 9 aa, synthetic construct
GRYGDYFDY

SEQ ID NO: 2350 - protein, 9 aa, synthetic construct
GRYGDYFDY

SEQ ID NO: 2351 - protein, 9 aa, synthetic construct
GRYGDYFDY

SEQ ID NO: 2352 - protein, 9 aa, synthetic construct
GRYGDYFDY

SEQ ID NO: 2353 - protein, 9 aa, synthetic construct
GRYGDYFDY

SEQ ID NO: 2354 - protein, 9 aa, synthetic construct
GRYGDYFDY

SEQ ID NO: 2355 - protein, 9 aa, synthetic construct
GRYGDYFDY

SEQ ID NO: 2356 - protein, 9 aa, synthetic construct
GRYGDYFDY

SEQ ID NO: 2357 - protein, 9 aa, synthetic construct
GRYGEYFDY

SEQ ID NO: 2358 - protein, 10 aa, synthetic construct
NLYGHYVMDY

SEQ ID NO: 2359 - protein, 10 aa, synthetic construct
NLYGHYVMDY

SEQ ID NO: 2360 - protein, 10 aa, synthetic construct
NLYGHYVMDY

SEQ ID NO: 2361 - protein, 10 aa, synthetic construct
NLYGHYVMDY

SEQ ID NO: 2362 - protein, 10 aa, synthetic construct
NLYGHYVMDY

SEQ ID NO: 2363 - protein, 10 aa, synthetic construct
NLYGHYVMDY

SEQ ID NO: 2364 - protein, 10 aa, synthetic construct
NLYGHYVMDY

SEQ ID NO: 2365 - protein, 10 aa, synthetic construct
NLYGHYVMDY

SEQ ID NO: 2366 - protein, 10 aa, synthetic construct
NLYGHYVMDY

SEQ ID NO: 2367 - protein, 10 aa, synthetic construct
NLYGHYVMDY

SEQ ID NO: 2368 - protein, 10 aa, synthetic construct
NLYGHYVMDY

SEQ ID NO: 2369 - protein, 10 aa, synthetic construct
NLYGHYVMDY

SEQ ID NO: 2370 - protein, 9 aa, synthetic construct
WGDGYSFAY

SEQ ID NO: 2371 - protein, 9 aa, synthetic construct
WGDGYSFAY

SEQ ID NO: 2372 - protein, 9 aa, synthetic construct
WGDGYSFAY

SEQ ID NO: 2373 - protein, 9 aa, synthetic construct
WGDGYSFAY

SEQ ID NO: 2374 - protein, 9 aa, synthetic construct
WGDGYSFAY

SEQ ID NO: 2375 - protein, 9 aa, synthetic construct
WGDGYSFAY

SEQ ID NO: 2376 - protein, 9 aa, synthetic construct
WGDGYSFAY

SEQ ID NO: 2377 - protein, 10 aa, synthetic construct
RGERGPWFAY

SEQ ID NO: 2378 - protein, 10 aa, synthetic construct
RGERGPWFAY

SEQ ID NO: 2379 - protein, 10 aa, synthetic construct
RGERGPWFAY

SEQ ID NO: 2380 - protein, 10 aa, synthetic construct
RGERGPWFAY

SEQ ID NO: 2381 - protein, 10 aa, synthetic construct
RGERGPWFAY

SEQ ID NO: 2382 - protein, 10 aa, synthetic construct
RGERGPWFAY

SEQ ID NO: 2383 - protein, 10 aa, synthetic construct
RGERGPWFAY

SEQ ID NO: 2384 - protein, 10 aa, synthetic construct
RGERGPWFAY

SEQ ID NO: 2385 - protein, 10 aa, synthetic construct
RGERGPWFAY

SEQ ID NO: 2386 - protein, 9 aa, synthetic construct
YDVYYRFAY

SEQ ID NO: 2387 - protein, 9 aa, synthetic construct
YDGYYRFAY

SEQ ID NO: 2388 - protein, 9 aa, synthetic construct
YDIYYRFAY

SEQ ID NO: 2389 - protein, 8 aa, synthetic construct
PGGYGFVY

SEQ ID NO: 2390 - protein, 8 aa, synthetic construct
PGGYGFAD

SEQ ID NO: 2391 - protein, 8 aa, synthetic construct
PGGYGFTY

SEQ ID NO: 2392 - protein, 8 aa, synthetic construct
PGGYGFAY

SEQ ID NO: 2393 - protein, 8 aa, synthetic construct
PGGYGFAY

SEQ ID NO: 2394 - protein, 6 aa, synthetic construct
GNYIDY

SEQ ID NO: 2395 - protein, 6 aa, synthetic construct
GNYIDY

SEQ ID NO: 2396 - protein, 6 aa, synthetic construct
GNYIDY

SEQ ID NO: 2397 - protein, 8 aa, synthetic construct
PGDLGFAY

SEQ ID NO: 2398 - protein, 8 aa, synthetic construct
PGDLGFAY

SEQ ID NO: 2399 - protein, 8 aa, synthetic construct
PGDLGFAY

SEQ ID NO: 2400 - protein, 8 aa, synthetic construct
PGDLGFAY

SEQ ID NO: 2401 - protein, 8 aa, synthetic construct
PGDLGFAY

SEQ ID NO: 2402 - protein, 8 aa, synthetic construct
PGDLGFAY

SEQ ID NO: 2403 - protein, 8 aa, synthetic construct
PGDLGFAY

SEQ ID NO: 2404 - protein, 8 aa, synthetic construct
PGDLGFAY

SEQ ID NO: 2405 - protein, 8 aa, synthetic construct
PGDLGFAY

SEQ ID NO: 2406 - protein, 12 aa, synthetic construct
GDGYDDGYAMDY

SEQ ID NO: 2407 - protein, 12 aa, synthetic construct
GDGYDDGYAMDY

SEQ ID NO: 2408 - protein, 12 aa, synthetic construct
GDGYDDGYAMDY

SEQ ID NO: 2409 - protein, 12 aa, synthetic construct
GDGYDDGYAMDY

SEQ ID NO: 2410 - protein, 12 aa, synthetic construct
GDGYDDGYAMDY

SEQ ID NO: 2411 - protein, 12 aa, synthetic construct
GDGYDDGYAMDY

SEQ ID NO: 2412 - protein, 4 aa, synthetic construct
TRNY

SEQ ID NO: 2413 - protein, 4 aa, synthetic construct
TRNY

SEQ ID NO: 2414 - protein, 4 aa, synthetic construct
TRNY

SEQ ID NO: 2415 - protein, 11 aa, synthetic construct
PLLRYSSAMDY

SEQ ID NO: 2416 - protein, 11 aa, synthetic construct
PLLRYSSSMDY

SEQ ID NO: 2417 - protein, 11 aa, synthetic construct
ALLRYSSAMDY

SEQ ID NO: 2418 - protein, 11 aa, synthetic construct
PLLRYSSAMDY

SEQ ID NO: 2419 - protein, 11 aa, synthetic construct
PLLRYSSSMDY

SEQ ID NO: 2420 - protein, 11 aa, synthetic construct
ALLRYSSAMDY

SEQ ID NO: 2421 - protein, 14 aa, synthetic construct
GPDDGYFYYYSMDY

SEQ ID NO: 2422 - protein, 13 aa, synthetic construct
YYTHEAYYYAMDC

SEQ ID NO: 2423 - protein, 13 aa, synthetic construct
YYTHETYYYAMDY

SEQ ID NO: 2424 - protein, 9 aa, synthetic construct
YSIYDAMDY

SEQ ID NO: 2425 - protein, 10 aa, synthetic construct
RGERGPWFAY

SEQ ID NO: 2426 - protein, 10 aa, synthetic construct
RGERGPWFAY

SEQ ID NO: 2427 - protein, 14 aa, synthetic construct
QMDYDYTYYYAMDY

SEQ ID NO: 2428 - protein, 13 aa, synthetic construct
AEYGYGNYPWFAY

SEQ ID NO: 2429 - protein, 13 aa, synthetic construct
AEYGYGNYPWFAY

SEQ ID NO: 2430 - protein, 11 aa, synthetic construct
PYYYGGWYFDV

SEQ ID NO: 2431 - protein, 8 aa, synthetic construct
MDGPWFAY

SEQ ID NO: 2432 - protein, 11 aa, synthetic construct
LYDAHWDYFDY

SEQ ID NO: 2433 - protein, 11 aa, synthetic construct
RPYYRYDSFAY

SEQ ID NO: 2434 - protein, 9 aa, synthetic construct
KYYDYEFAY

SEQ ID NO: 2435 - protein, 9 aa, synthetic construct
KYYDYEFAY

SEQ ID NO: 2436 - protein, 9 aa, synthetic construct
LGDYDVMDY

SEQ ID NO: 2437 - protein, 9 aa, synthetic construct
LGDYDVMDY

SEQ ID NO: 2438 - protein, 10 aa, synthetic construct
AGRYGSSFDY

SEQ ID NO: 2439 - protein, 12 aa, synthetic construct
RPDDYDGAWFPY

SEQ ID NO: 2440 - protein, 11 aa, synthetic construct
YYDYDAYYFDY

SEQ ID NO: 2441 - protein, 11 aa, synthetic construct
YYDYDAYYFDY

SEQ ID NO: 2442 - protein, 9 aa, synthetic construct
PYYGYDVGY

SEQ ID NO: 2443 - protein, 8 aa, synthetic construct
EEKIYFDY

SEQ ID NO: 2444 - protein, 8 aa, synthetic construct
EEKIYFDY

SEQ ID NO: 2445 - protein, 8 aa, synthetic construct
YDGYWFDY

SEQ ID NO: 2446 - protein, 10 aa, synthetic construct
LITTAYYFDY

SEQ ID NO: 2447 - protein, 10 aa, synthetic construct
LITTAYYFDY

SEQ ID NO: 2448 - protein, 15 aa, synthetic construct
ETGDYGSSYVWYFDV

SEQ ID NO: 2449 - protein, 8 aa, synthetic construct
GKVTRFAY

SEQ ID NO: 2450 - protein, 11 aa, synthetic construct
DQDSNWEYFDY

SEQ ID NO: 2451 - protein, 9 aa, synthetic construct
ESWDRAMDY

SEQ ID NO: 2452 - protein, 11 aa, synthetic construct
HEEANWAWFAY

SEQ ID NO: 2453 - protein, 11 aa, synthetic construct
HEEANWAWFAY

SEQ ID NO: 2454 - protein, 7 aa, synthetic construct
PYYAMDY

SEQ ID NO: 2455 - protein, 7 aa, synthetic construct
PYYAMDY

SEQ ID NO: 2456 - protein, 11 aa, synthetic construct
YYGNYVWYFDV

SEQ ID NO: 2457 - protein, 11 aa, synthetic construct
YYGNYVWYFDV

SEQ ID NO: 2458 - protein, 10 aa, synthetic construct
YGSSYWYFDV

SEQ ID NO: 2459 - protein, 10 aa, synthetic construct
YGSSYWYFDV

SEQ ID NO: 2460 - protein, 13 aa, synthetic construct
YYGSSRSYWYLDV

SEQ ID NO: 2461 - protein, 13 aa, synthetic construct
YYGSSRSYWYLDV

SEQ ID NO: 2462 - protein, 13 aa, synthetic construct
DYYGSSHLWYFDV

SEQ ID NO: 2463 - protein, 12 aa, synthetic construct
RAHYDYGWYFDV

SEQ ID NO: 2464 - protein, 9 aa, synthetic construct
YDYDWYFDV

SEQ ID NO: 2465 - protein, 11 aa, synthetic construct
HDDSSYDWFAY

SEQ ID NO: 2466 - protein, 11 aa, synthetic construct
HEDSNYHYFDY

SEQ ID NO: 2467 - protein, 9 aa, synthetic construct
FGDGYHFDY

SEQ ID NO: 2468 - protein, 11 aa, synthetic construct
QNDSSWAWFAY

SEQ ID NO: 2469 - protein, 11 aa, synthetic construct
QNDSSWAWFAY

SEQ ID NO: 2470 - protein, 11 aa, synthetic construct
PYSNYGWYFDV

SEQ ID NO: 2471 - protein, 11 aa, synthetic construct
PYSNYGWYFDV

SEQ ID NO: 2472 - protein, 11 aa, synthetic construct
DYYGSYWYFDV

SEQ ID NO: 2473 - protein, 11 aa, synthetic construct
DYYGSYWYFDV

SEQ ID NO: 2474 - protein, 9 aa, synthetic construct
YGNSAWFAY

SEQ ID NO: 2475 - protein, 9 aa, synthetic construct
YGNSAWFAY

SEQ ID NO: 2476 - protein, 7 aa, synthetic construct
WYPYFDY

SEQ ID NO: 2477 - protein, 7 aa, synthetic construct
WYPYFDY

SEQ ID NO: 2478 - protein, 7 aa, synthetic construct
WYPYFDY

SEQ ID NO: 2479 - protein, 12 aa, synthetic construct
SDGSSGNWYFDV

SEQ ID NO: 2480 - protein, 12 aa, synthetic construct
SDGSSGNWYFDV

SEQ ID NO: 2481 - protein, 10 aa, synthetic construct
EGGYTGYFDV

SEQ ID NO: 2482 - protein, 10 aa, synthetic construct
EGGYTGYFDV

SEQ ID NO: 2483 - protein, 11 aa, synthetic construct
SNYVPYYAMDY

SEQ ID NO: 2484 - protein, 11 aa, synthetic construct
SNYVPYYAMDY

SEQ ID NO: 2485 - protein, 5 aa, synthetic construct
RGFDY

SEQ ID NO: 2486 - protein, 11 aa, synthetic construct
HNYSNWDWFAY

SEQ ID NO: 2487 - protein, 13 aa, synthetic construct
DYYGSGYGYYFDY

SEQ ID NO: 2488 - protein, 13 aa, synthetic construct
DYYGSSYGWYFDV

SEQ ID NO: 2489 - protein, 13 aa, synthetic construct
DYYGSSYGWYFDV

SEQ ID NO: 2490 - protein, 13 aa, synthetic construct
DYYGSSYGWYFDV

SEQ ID NO: 2491 - protein, 13 aa, synthetic construct
DYYGSSYGWYFDV

SEQ ID NO: 2492 - protein, 13 aa, synthetic construct
DYYGSGYGWYFDV

SEQ ID NO: 2493 - protein, 9 aa, synthetic construct
YDGYYRFAY

SEQ ID NO: 2494 - protein, 9 aa, synthetic construct
YDVYYRFAY

SEQ ID NO: 2495 - protein, 11 aa, synthetic construct
DYGNYDYAMDY

SEQ ID NO: 2496 - protein, 11 aa, synthetic construct
DYGNYDYAMDY

SEQ ID NO: 2497 - protein, 11 aa, synthetic construct
DYGNYDYAMDY

SEQ ID NO: 2498 - protein, 11 aa, synthetic construct
DYGNYDYAMDY

SEQ ID NO: 2499 - protein, 11 aa, synthetic construct
QLTGTWYYFDY

SEQ ID NO: 2500 - protein, 11 aa, synthetic construct
QLTGTWYYFDY

SEQ ID NO: 2501 - protein, 11 aa, synthetic construct
QLTGTWYYFDY

SEQ ID NO: 2502 - protein, 14 aa, synthetic construct
GPDDGYFYYYSMDY

SEQ ID NO: 2503 - protein, 10 aa, synthetic construct
QEGIGYAMDY

SEQ ID NO: 2504 - protein, 7 aa, synthetic construct
GGWLLGY

SEQ ID NO: 2505 - protein, 10 aa, synthetic construct
DGGIRGAMDY

SEQ ID NO: 2506 - protein, 11 aa, synthetic construct
RGYGYDEGFDY

SEQ ID NO: 2507 - protein, 8 aa, synthetic construct
NYDYAMDY

SEQ ID NO: 2508 - protein, 10 aa, synthetic construct
QEGIGYALDY

SEQ ID NO: 2509 - protein, 14 aa, synthetic construct
EREWGVYYGSSLDY

SEQ ID NO: 2510 - protein, 6 aa, synthetic construct
SDGNYD

SEQ ID NO: 2511 - protein, 10 aa, synthetic construct
QEGIGYGMDY

SEQ ID NO: 2512 - protein, 9 aa, synthetic construct
HDGVVGFDV

SEQ ID NO: 2513 - protein, 5 aa, synthetic construct
GGGRG

SEQ ID NO: 2514 - protein, 11 aa, synthetic construct
DYYDYYYAMDY

SEQ ID NO: 2515 - protein, 9 aa, synthetic construct
ESWDRAMDY

SEQ ID NO: 2516 - protein, 12 aa, synthetic construct
IYSDYDGAWFAY

SEQ ID NO: 2517 - protein, 7 aa, synthetic construct
GTVGFAY

SEQ ID NO: 2518 - protein, 14 aa, synthetic construct
EREWGVFYGSSLDY

SEQ ID NO: 2519 - protein, 11 aa, synthetic construct
HDDSSYGYFDY

SEQ ID NO: 2520 - protein, 5 aa, synthetic construct
TMPDV

SEQ ID NO: 2521 - protein, 11 aa, synthetic construct
DTDGYYWAMDY

SEQ ID NO: 2522 - protein, 5 aa, synthetic construct
KWGDY

SEQ ID NO: 2523 - protein, 8 aa, synthetic construct
NYDYALDY

SEQ ID NO: 2524 - protein, 5 aa, synthetic construct
GGGRG

SEQ ID NO: 2525 - protein, 10 aa, synthetic construct
QEEIGYAMDY

SEQ ID NO: 2526 - protein, 8 aa, synthetic construct
SGNMGFTY

SEQ ID NO: 2527 - protein, 8 aa, synthetic construct
SGNMGFTY

SEQ ID NO: 2528 - protein, 11 aa, synthetic construct
QGGSSWGAMDY

SEQ ID NO: 2529 - protein, 11 aa, synthetic construct
QGGSSWGAMDY

SEQ ID NO: 2530 - protein, 9 aa, synthetic construct
HEITTRFAY

SEQ ID NO: 2531 - protein, 7 aa, synthetic construct
EAGYFDY

SEQ ID NO: 2532 - protein, 8 aa, synthetic construct
QYGYDFDY

SEQ ID NO: 2533 - protein, 11 aa, synthetic construct
HKGVNWDYFDY

SEQ ID NO: 2534 - protein, 12 aa, synthetic construct
GDGNYDSWYFDV

SEQ ID NO: 2535 - protein, 10 aa, synthetic construct
LPVTTVVFDY

SEQ ID NO: 2536 - protein, 9 aa, synthetic construct
RPVVVPFDY

SEQ ID NO: 2537 - protein, 9 aa, synthetic construct
GWDADYFDY

SEQ ID NO: 2538 - protein, 6 aa, synthetic construct
YDYDDY

SEQ ID NO: 2539 - protein, 10 aa, synthetic construct
SELGLYAMDY

SEQ ID NO: 2540 - protein, 8 aa, synthetic construct
GRIHYFDY

SEQ ID NO: 2541 - protein, 8 aa, synthetic construct
GRIHYFDY

SEQ ID NO: 2542 - protein, 11 aa, synthetic construct
KGYGYDWYFDV

SEQ ID NO: 2543 - protein, 11 aa, synthetic construct
KGYGYDWYFDV

SEQ ID NO: 2544 - protein, 10 aa, synthetic construct
SSYYYYAMDY

SEQ ID NO: 2545 - protein, 10 aa, synthetic construct
SSYYYYAMDY

SEQ ID NO: 2546 - protein, 5 aa, synthetic construct
GGGRD

SEQ ID NO: 2547 - protein, 11 aa, synthetic construct
GGDYDSYAMDY

SEQ ID NO: 2548 - protein, 13 aa, synthetic construct
ESVYDGYSWYFDV

SEQ ID NO: 2549 - protein, 11 aa, synthetic construct
TYDYDDWYFDV

SEQ ID NO: 2550 - protein, 10 aa, synthetic construct
SGNYLYAMDY

SEQ ID NO: 2551 - protein, 9 aa, synthetic construct
EGTSWYFDV

SEQ ID NO: 2552 - protein, 11 aa, synthetic construct
KGDGYDWYFDV

SEQ ID NO: 2553 - protein, 13 aa, synthetic construct
EGNYGSSYDAMDY

SEQ ID NO: 2554 - protein, 10 aa, synthetic construct
SSNYPYAMDY

SEQ ID NO: 2555 - protein, 5 aa, synthetic construct
YSGLY

SEQ ID NO: 2556 - protein, 13 aa, synthetic construct
RGQIYYGYSWFAY

SEQ ID NO: 2557 - protein, 11 aa, synthetic construct
STVVADWYFDV

SEQ ID NO: 2558 - protein, 10 aa, synthetic construct
SGSSYGYFDV

SEQ ID NO: 2559 - protein, 11 aa, synthetic construct
KGGYDAYAMDY

SEQ ID NO: 2560 - protein, 12 aa, synthetic construct
EGFITTVVAVDY

SEQ ID NO: 2561 - protein, 9 aa, synthetic construct
EGNYDAMDY

SEQ ID NO: 2562 - protein, 8 aa, synthetic construct
WDYYGVDY

SEQ ID NO: 2563 - protein, 12 aa, synthetic construct
SLTATHTYEYDY

SEQ ID NO: 2564-3076 - skipped (513 entries)

SEQ ID NO: 3077 - protein, 7 aa, synthetic construct
GYTFSSY

SEQ ID NO: 3078 - protein, 7 aa, synthetic construct
GYTFSSY

SEQ ID NO: 3079 - protein, 7 aa, synthetic construct
GYTFSSY

SEQ ID NO: 3080 - protein, 7 aa, synthetic construct
AYTFSIY

SEQ ID NO: 3081 - protein, 7 aa, synthetic construct
GYTFSSY

SEQ ID NO: 3082 - protein, 7 aa, synthetic construct
GYTFSSY

SEQ ID NO: 3083 - protein, 7 aa, synthetic construct
GYTFSSY

SEQ ID NO: 3084 - protein, 7 aa, synthetic construct
GYTFSNY

SEQ ID NO: 3085 - protein, 7 aa, synthetic construct
GYTFSSY

SEQ ID NO: 3086 - protein, 7 aa, synthetic construct
GYTFSSY

SEQ ID NO: 3087 - protein, 7 aa, synthetic construct
GYTFSSY

SEQ ID NO: 3088 - protein, 7 aa, synthetic construct
GYTLSSY

SEQ ID NO: 3089 - protein, 7 aa, synthetic construct
GYTFSSY

SEQ ID NO: 3090 - protein, 7 aa, synthetic construct
GYTFSSY

SEQ ID NO: 3091 - protein, 7 aa, synthetic construct
GYTFGTY

SEQ ID NO: 3092 - protein, 7 aa, synthetic construct
GYTFSSY

SEQ ID NO: 3093 - protein, 7 aa, synthetic construct
GYTFSSY

SEQ ID NO: 3094 - protein, 7 aa, synthetic construct
GYTFSSY

SEQ ID NO: 3095 - protein, 7 aa, synthetic construct
GYTFSSY

SEQ ID NO: 3096 - protein, 7 aa, synthetic construct
GYTFSSY

SEQ ID NO: 3097 - protein, 7 aa, synthetic construct
GYTFSSY

SEQ ID NO: 3098 - protein, 7 aa, synthetic construct
GYTFSSY

SEQ ID NO: 3099 - protein, 7 aa, synthetic construct
GYTFSSY

SEQ ID NO: 3100 - protein, 7 aa, synthetic construct
GYTFSSY

SEQ ID NO: 3101 - protein, 7 aa, synthetic construct
GYTFSSY

SEQ ID NO: 3102 - protein, 7 aa, synthetic construct
AYTFSIY

SEQ ID NO: 3103 - protein, 7 aa, synthetic construct
GYTFSSY

SEQ ID NO: 3104 - protein, 7 aa, synthetic construct
GYTFSNY

SEQ ID NO: 3105 - protein, 7 aa, synthetic construct
GYTFSSY

SEQ ID NO: 3106 - protein, 7 aa, synthetic construct
GYTFSSY

SEQ ID NO: 3107 - protein, 7 aa, synthetic construct
GYTLSSY

SEQ ID NO: 3108 - protein, 7 aa, synthetic construct
GYTFSSY

SEQ ID NO: 3109 - protein, 7 aa, synthetic construct
GYTFGTY

SEQ ID NO: 3110 - protein, 7 aa, synthetic construct
GYTFSSY

SEQ ID NO: 3111 - protein, 7 aa, synthetic construct
GYTFSSY

SEQ ID NO: 3112 - protein, 7 aa, synthetic construct
GYTFSNY

SEQ ID NO: 3113 - protein, 7 aa, synthetic construct
GYTFSSY

SEQ ID NO: 3114 - protein, 7 aa, synthetic construct
GYSFTGY

SEQ ID NO: 3115 - protein, 7 aa, synthetic construct
GYSFTGY

SEQ ID NO: 3116 - protein, 7 aa, synthetic construct
GYSFTGY

SEQ ID NO: 3117 - protein, 7 aa, synthetic construct
GYSFTGY

SEQ ID NO: 3118 - protein, 7 aa, synthetic construct
GYSFTGY

SEQ ID NO: 3119 - protein, 7 aa, synthetic construct
GYSFTGY

SEQ ID NO: 3120 - protein, 7 aa, synthetic construct
GYSFTGY

SEQ ID NO: 3121 - protein, 7 aa, synthetic construct
GYSFTGY

SEQ ID NO: 3122 - protein, 7 aa, synthetic construct
GYSFTGY

SEQ ID NO: 3123 - protein, 7 aa, synthetic construct
GYSFTGF

SEQ ID NO: 3124 - protein, 7 aa, synthetic construct
GYSFTGY

SEQ ID NO: 3125 - protein, 7 aa, synthetic construct
GYSFTGY

SEQ ID NO: 3126 - protein, 7 aa, synthetic construct
GYSFTGY

SEQ ID NO: 3127 - protein, 7 aa, synthetic construct
GFSLSSY

SEQ ID NO: 3128 - protein, 7 aa, synthetic construct
GFSVTSY

SEQ ID NO: 3129 - protein, 7 aa, synthetic construct
GFSLTSY

SEQ ID NO: 3130 - protein, 7 aa, synthetic construct
GFSLTRY

SEQ ID NO: 3131 - protein, 7 aa, synthetic construct
GFSVTTY

SEQ ID NO: 3132 - protein, 7 aa, synthetic construct
GFSVTSY

SEQ ID NO: 3133 - protein, 7 aa, synthetic construct
GFSLTRY

SEQ ID NO: 3134 - protein, 7 aa, synthetic construct
GFSLSSY

SEQ ID NO: 3135 - protein, 7 aa, synthetic construct
GFSVTSY

SEQ ID NO: 3136 - protein, 7 aa, synthetic construct
GFSLTSY

SEQ ID NO: 3137 - protein, 7 aa, synthetic construct
GFSLTRY

SEQ ID NO: 3138 - protein, 7 aa, synthetic construct
GFSVTTY

SEQ ID NO: 3139 - protein, 7 aa, synthetic construct
GYTFTSY

SEQ ID NO: 3140 - protein, 7 aa, synthetic construct
GYTFTSY

SEQ ID NO: 3141 - protein, 7 aa, synthetic construct
GYTFTTY

SEQ ID NO: 3142 - protein, 7 aa, synthetic construct
GYTFTSY

SEQ ID NO: 3143 - protein, 7 aa, synthetic construct
GYTFTSY

SEQ ID NO: 3144 - protein, 7 aa, synthetic construct
GYTFTSY

SEQ ID NO: 3145 - protein, 7 aa, synthetic construct
GYTFTSY

SEQ ID NO: 3146 - protein, 7 aa, synthetic construct
GYTFTDY

SEQ ID NO: 3147 - protein, 7 aa, synthetic construct
GYTFTDY

SEQ ID NO: 3148 - protein, 7 aa, synthetic construct
GYTFTDY

SEQ ID NO: 3149 - protein, 7 aa, synthetic construct
GYTFTDY

SEQ ID NO: 3150 - protein, 7 aa, synthetic construct
GYTFTDY

SEQ ID NO: 3151 - protein, 7 aa, synthetic construct
GYTFTDY

SEQ ID NO: 3152 - protein, 7 aa, synthetic construct
GYTFTDY

SEQ ID NO: 3153 - protein, 7 aa, synthetic construct
GYTFTDY

SEQ ID NO: 3154 - protein, 7 aa, synthetic construct
GYTFTDY

SEQ ID NO: 3155 - protein, 7 aa, synthetic construct
GYTFTNY

SEQ ID NO: 3156 - protein, 7 aa, synthetic construct
GYTFTNY

SEQ ID NO: 3157 - protein, 7 aa, synthetic construct
GYTFTNY

SEQ ID NO: 3158 - protein, 7 aa, synthetic construct
GYTFTSY

SEQ ID NO: 3159 - protein, 7 aa, synthetic construct
GYTFTSY

SEQ ID NO: 3160 - protein, 7 aa, synthetic construct
GYTFTTY

SEQ ID NO: 3161 - protein, 7 aa, synthetic construct
GYTFTSY

SEQ ID NO: 3162 - protein, 7 aa, synthetic construct
GYTFTSY

SEQ ID NO: 3163 - protein, 7 aa, synthetic construct
GYTFTSY

SEQ ID NO: 3164 - protein, 7 aa, synthetic construct
GYTFTSY

SEQ ID NO: 3165 - protein, 7 aa, synthetic construct
GYTFTDY

SEQ ID NO: 3166 - protein, 7 aa, synthetic construct
GYTFTDY

SEQ ID NO: 3167 - protein, 7 aa, synthetic construct
GYTFTDY

SEQ ID NO: 3168 - protein, 7 aa, synthetic construct
GYTFTDY

SEQ ID NO: 3169 - protein, 7 aa, synthetic construct
GYTFTDY

SEQ ID NO: 3170 - protein, 7 aa, synthetic construct
GYTFTDY

SEQ ID NO: 3171 - protein, 7 aa, synthetic construct
GYTFTDY

SEQ ID NO: 3172 - protein, 7 aa, synthetic construct
GYTFTDY

SEQ ID NO: 3173 - protein, 7 aa, synthetic construct
GYTFTDY

SEQ ID NO: 3174 - protein, 7 aa, synthetic construct
GYTFTDY

SEQ ID NO: 3175 - protein, 7 aa, synthetic construct
GFSLTNY

SEQ ID NO: 3176 - protein, 7 aa, synthetic construct
GFSLTSY

SEQ ID NO: 3177 - protein, 7 aa, synthetic construct
GFSLTSY

SEQ ID NO: 3178 - protein, 7 aa, synthetic construct
GFSLTNY

SEQ ID NO: 3179 - protein, 7 aa, synthetic construct
GFSLTSY

SEQ ID NO: 3180 - protein, 7 aa, synthetic construct
GFSLTSY

SEQ ID NO: 3181 - protein, 7 aa, synthetic construct
GYSFTSY

SEQ ID NO: 3182 - protein, 7 aa, synthetic construct
GYSFTSY

SEQ ID NO: 3183 - protein, 7 aa, synthetic construct
GYSFTSY

SEQ ID NO: 3184 - protein, 7 aa, synthetic construct
GFNIKDY

SEQ ID NO: 3185 - protein, 7 aa, synthetic construct
GFNIKDY

SEQ ID NO: 3186 - protein, 7 aa, synthetic construct
GFNIKDY

SEQ ID NO: 3187 - protein, 7 aa, synthetic construct
GFNIKDY

SEQ ID NO: 3188 - protein, 7 aa, synthetic construct
GFNIKDY

SEQ ID NO: 3189 - protein, 7 aa, synthetic construct
GFNIKDY

SEQ ID NO: 3190 - protein, 7 aa, synthetic construct
GFNIKDT

SEQ ID NO: 3191 - protein, 7 aa, synthetic construct
GYTFSNY

SEQ ID NO: 3192 - protein, 7 aa, synthetic construct
GSTFTTY

SEQ ID NO: 3193 - protein, 7 aa, synthetic construct
GFNIKDY

SEQ ID NO: 3194 - protein, 7 aa, synthetic construct
GYTFTDY

SEQ ID NO: 3195 - protein, 7 aa, synthetic construct
GYTFTDY

SEQ ID NO: 3196 - protein, 7 aa, synthetic construct
GYSFTDY

SEQ ID NO: 3197 - protein, 7 aa, synthetic construct
GYTFTSY

SEQ ID NO: 3198 - protein, 7 aa, synthetic construct
GYTFTSY

SEQ ID NO: 3199 - protein, 7 aa, synthetic construct
GYTFTSY

SEQ ID NO: 3200 - protein, 7 aa, synthetic construct
GYTFTDY

SEQ ID NO: 3201 - protein, 7 aa, synthetic construct
GFTFSSY

SEQ ID NO: 3202 - protein, 9 aa, synthetic construct
GISLSTSGM

SEQ ID NO: 3203 - protein, 7 aa, synthetic construct
GYTFTNY

SEQ ID NO: 3204 - protein, 7 aa, synthetic construct
GYTFTNY

SEQ ID NO: 3205 - protein, 7 aa, synthetic construct
GYTFTDY

SEQ ID NO: 3206 - protein, 7 aa, synthetic construct
GYTFTDY

SEQ ID NO: 3207 - protein, 7 aa, synthetic construct
GYTFTSY

SEQ ID NO: 3208 - protein, 9 aa, synthetic construct
GFSLSTSGM

SEQ ID NO: 3209 - protein, 7 aa, synthetic construct
GYTFTSS

SEQ ID NO: 3210 - protein, 7 aa, synthetic construct
GYTFTSS

SEQ ID NO: 3211 - protein, 7 aa, synthetic construct
GYTFTSY

SEQ ID NO: 3212 - protein, 7 aa, synthetic construct
GYTFTDY

SEQ ID NO: 3213 - protein, 7 aa, synthetic construct
GYTFTDY

SEQ ID NO: 3214 - protein, 7 aa, synthetic construct
GYTFTSY

SEQ ID NO: 3215 - protein, 7 aa, synthetic construct
GYTFTSY

SEQ ID NO: 3216 - protein, 7 aa, synthetic construct
GYTFTSY

SEQ ID NO: 3217 - protein, 7 aa, synthetic construct
GYTFTSY

SEQ ID NO: 3218 - protein, 7 aa, synthetic construct
GYTFTDY

SEQ ID NO: 3219 - protein, 7 aa, synthetic construct
GFTFSSY

SEQ ID NO: 3220 - protein, 7 aa, synthetic construct
GYTFTDY

SEQ ID NO: 3221 - protein, 7 aa, synthetic construct
GFTFSSY

SEQ ID NO: 3222 - protein, 7 aa, synthetic construct
GFTFSSY

SEQ ID NO: 3223 - protein, 7 aa, synthetic construct
GYSFTNY

SEQ ID NO: 3224 - protein, 7 aa, synthetic construct
GYSFTNY

SEQ ID NO: 3225 - protein, 7 aa, synthetic construct
GYTFTSS

SEQ ID NO: 3226 - protein, 7 aa, synthetic construct
GYTFTSS

SEQ ID NO: 3227 - protein, 7 aa, synthetic construct
GYTFTSY

SEQ ID NO: 3228 - protein, 7 aa, synthetic construct
GYTFTSY

SEQ ID NO: 3229 - protein, 7 aa, synthetic construct
GFSLTSY

SEQ ID NO: 3230 - protein, 7 aa, synthetic construct
GFSLTSY

SEQ ID NO: 3231 - protein, 7 aa, synthetic construct
GYTFTSY

SEQ ID NO: 3232 - protein, 9 aa, synthetic construct
GFSLSTSGM

SEQ ID NO: 3233 - protein, 7 aa, synthetic construct
GYTFTSY

SEQ ID NO: 3234 - protein, 7 aa, synthetic construct
GFTFSSY

SEQ ID NO: 3235 - protein, 7 aa, synthetic construct
GFTFSSY

SEQ ID NO: 3236 - protein, 7 aa, synthetic construct
GYTFTNY

SEQ ID NO: 3237 - protein, 7 aa, synthetic construct
GFTFSSY

SEQ ID NO: 3238 - protein, 7 aa, synthetic construct
GFTFSSY

SEQ ID NO: 3239 - protein, 7 aa, synthetic construct
GYTFTSY

SEQ ID NO: 3240 - protein, 7 aa, synthetic construct
GYTFTSY

SEQ ID NO: 3241 - protein, 7 aa, synthetic construct
GYTFTSY

SEQ ID NO: 3242 - protein, 7 aa, synthetic construct
GYTFTSY

SEQ ID NO: 3243 - protein, 7 aa, synthetic construct
GFNIKDY

SEQ ID NO: 3244 - protein, 7 aa, synthetic construct
GFNIKDY

SEQ ID NO: 3245 - protein, 7 aa, synthetic construct
GYTFTNY

SEQ ID NO: 3246 - protein, 7 aa, synthetic construct
GYTFTNY

SEQ ID NO: 3247 - protein, 7 aa, synthetic construct
GYTFTNY

SEQ ID NO: 3248 - protein, 7 aa, synthetic construct
GYTFTSY

SEQ ID NO: 3249 - protein, 7 aa, synthetic construct
GYTFTSY

SEQ ID NO: 3250 - protein, 7 aa, synthetic construct
GFSLTSY

SEQ ID NO: 3251 - protein, 7 aa, synthetic construct
GFSLTSY

SEQ ID NO: 3252 - protein, 7 aa, synthetic construct
GYTFTSY

SEQ ID NO: 3253 - protein, 7 aa, synthetic construct
GYTFTSY

SEQ ID NO: 3254 - protein, 7 aa, synthetic construct
GYTFTDY

SEQ ID NO: 3255 - protein, 7 aa, synthetic construct
GFTFSSY

SEQ ID NO: 3256 - protein, 7 aa, synthetic construct
GYTFTSY

SEQ ID NO: 3257 - protein, 7 aa, synthetic construct
GYTFTSY

SEQ ID NO: 3258 - protein, 7 aa, synthetic construct
GYTFTSY

SEQ ID NO: 3259 - protein, 7 aa, synthetic construct
GYTFTSY

SEQ ID NO: 3260 - protein, 7 aa, synthetic construct
GYTFTSY

SEQ ID NO: 3261 - protein, 7 aa, synthetic construct
GYTFTSY

SEQ ID NO: 3262 - protein, 7 aa, synthetic construct
GYTFTNY

SEQ ID NO: 3263 - protein, 7 aa, synthetic construct
GYTFTNY

SEQ ID NO: 3264 - protein, 7 aa, synthetic construct
GYTFTSY

SEQ ID NO: 3265 - protein, 7 aa, synthetic construct
GYTFTSY

SEQ ID NO: 3266 - protein, 7 aa, synthetic construct
GYTFTSY

SEQ ID NO: 3267 - protein, 7 aa, synthetic construct
GYTFTSY

SEQ ID NO: 3268 - protein, 7 aa, synthetic construct
GFTFSSY

SEQ ID NO: 3269 - protein, 7 aa, synthetic construct
GFTFSSY

SEQ ID NO: 3270 - protein, 7 aa, synthetic construct
GFTFSSY

SEQ ID NO: 3271 - protein, 7 aa, synthetic construct
GFNIKDT

SEQ ID NO: 3272 - protein, 7 aa, synthetic construct
GFTFSNY

SEQ ID NO: 3273 - protein, 7 aa, synthetic construct
GYTFTEY

SEQ ID NO: 3274 - protein, 7 aa, synthetic construct
GFSLTSY

SEQ ID NO: 3275 - protein, 7 aa, synthetic construct
GYTFSSY

SEQ ID NO: 3276 - protein, 7 aa, synthetic construct
GYTFTDY

SEQ ID NO: 3277 - protein, 7 aa, synthetic construct
GFTFSSY

SEQ ID NO: 3278 - protein, 7 aa, synthetic construct
GFTFSSY

SEQ ID NO: 3279 - protein, 7 aa, synthetic construct
GFNIKDT

SEQ ID NO: 3280 - protein, 7 aa, synthetic construct
GFTFSNY

SEQ ID NO: 3281 - protein, 7 aa, synthetic construct
GFTFNTY

SEQ ID NO: 3282 - protein, 8 aa, synthetic construct
GYSITSGY

SEQ ID NO: 3283 - protein, 7 aa, synthetic construct
GYTFTDY

SEQ ID NO: 3284 - protein, 7 aa, synthetic construct
GYTFTDY

SEQ ID NO: 3285 - protein, 7 aa, synthetic construct
GYTFTNY

SEQ ID NO: 3286 - protein, 7 aa, synthetic construct
GYTFTDY

SEQ ID NO: 3287 - protein, 7 aa, synthetic construct
GFTFSSY

SEQ ID NO: 3288 - protein, 7 aa, synthetic construct
GFTFSSY

SEQ ID NO: 3289 - protein, 7 aa, synthetic construct
GFTFSNY

SEQ ID NO: 3290 - protein, 7 aa, synthetic construct
GFSLTSY

SEQ ID NO: 3291 - protein, 8 aa, synthetic construct
GYSITSDH

SEQ ID NO: 3292 - protein, 7 aa, synthetic construct
GYTFTDY

SEQ ID NO: 3293 - protein, 8 aa, synthetic construct
GYSITSGY

SEQ ID NO: 3294 - protein, 7 aa, synthetic construct
GFTFSNY

SEQ ID NO: 3295 - protein, 7 aa, synthetic construct
GFNIKDY

SEQ ID NO: 3296 - protein, 7 aa, synthetic construct
GFNIKDY

SEQ ID NO: 3297 - protein, 7 aa, synthetic construct
GFTFSSY

SEQ ID NO: 3298 - protein, 7 aa, synthetic construct
GFTFSSY

SEQ ID NO: 3299 - protein, 7 aa, synthetic construct
GFTFSSY

SEQ ID NO: 3300 - protein, 8 aa, synthetic construct
GYSITSGY

SEQ ID NO: 3301 - protein, 7 aa, synthetic construct
GFSFNTY

SEQ ID NO: 3302 - protein, 7 aa, synthetic construct
GFTFSSY

SEQ ID NO: 3303 - protein, 7 aa, synthetic construct
GYTFTDY

SEQ ID NO: 3304 - protein, 7 aa, synthetic construct
GFTFSSY

SEQ ID NO: 3305 - protein, 7 aa, synthetic construct
GFTFSSY

SEQ ID NO: 3306 - protein, 7 aa, synthetic construct
GFSLTSY

SEQ ID NO: 3307 - protein, 7 aa, synthetic construct
GYTFTNY

SEQ ID NO: 3308 - protein, 7 aa, synthetic construct
GYTFTDY

SEQ ID NO: 3309 - protein, 7 aa, synthetic construct
GYTFTGY

SEQ ID NO: 3310 - protein, 7 aa, synthetic construct
GYTFTGY

SEQ ID NO: 3311 - protein, 7 aa, synthetic construct
GFSLTSY

SEQ ID NO: 3312 - protein, 7 aa, synthetic construct
GFSLTSY

SEQ ID NO: 3313 - protein, 7 aa, synthetic construct
GYTFTSY

SEQ ID NO: 3314 - protein, 7 aa, synthetic construct
GYTFTSY

SEQ ID NO: 3315 - protein, 8 aa, synthetic construct
GYSITSGY

SEQ ID NO: 3316 - protein, 7 aa, synthetic construct
GFSLTSY

SEQ ID NO: 3317 - protein, 7 aa, synthetic construct
GYTFTSY

SEQ ID NO: 3318 - protein, 7 aa, synthetic construct
GYSFTDY

SEQ ID NO: 3319 - protein, 7 aa, synthetic construct
GYTFTSY

SEQ ID NO: 3320 - protein, 7 aa, synthetic construct
GYSFTDY

SEQ ID NO: 3321 - protein, 7 aa, synthetic construct
GFSLTSY

SEQ ID NO: 3322 - protein, 7 aa, synthetic construct
GFSLTSY

SEQ ID NO: 3323 - protein, 7 aa, synthetic construct
GYTFTSY

SEQ ID NO: 3324 - protein, 7 aa, synthetic construct
GFNIKNT

SEQ ID NO: 3325 - protein, 7 aa, synthetic construct
GYTFTSY

SEQ ID NO: 3326 - protein, 7 aa, synthetic construct
GYTFTDY

SEQ ID NO: 3327 - protein, 7 aa, synthetic construct
GYTFTSY

SEQ ID NO: 3328 - protein, 7 aa, synthetic construct
GFSLTSY

SEQ ID NO: 3329 - protein, 7 aa, synthetic construct
GYSFTDY

SEQ ID NO: 3330 - protein, 7 aa, synthetic construct
GYTFTDY

SEQ ID NO: 3331 - protein, 7 aa, synthetic construct
GYTFTSY

SEQ ID NO: 3332 - protein, 7 aa, synthetic construct
GFTFSGY

SEQ ID NO: 3333-3590 - skipped (258 entries)

SEQ ID NO: 3591 - protein, 6 aa, synthetic construct
LPGSGS

SEQ ID NO: 3592 - protein, 6 aa, synthetic construct
LPGSGS

SEQ ID NO: 3593 - protein, 6 aa, synthetic construct
LPGSDS

SEQ ID NO: 3594 - protein, 6 aa, synthetic construct
LPGSGS

SEQ ID NO: 3595 - protein, 6 aa, synthetic construct
FPGSGH

SEQ ID NO: 3596 - protein, 6 aa, synthetic construct
LPGSGS

SEQ ID NO: 3597 - protein, 6 aa, synthetic construct
LPGSGS

SEQ ID NO: 3598 - protein, 6 aa, synthetic construct
LPGSGS

SEQ ID NO: 3599 - protein, 6 aa, synthetic construct
LPGSGS

SEQ ID NO: 3600 - protein, 6 aa, synthetic construct
LPGSGY

SEQ ID NO: 3601 - protein, 6 aa, synthetic construct
LPGSGS

SEQ ID NO: 3602 - protein, 6 aa, synthetic construct
LPGSGS

SEQ ID NO: 3603 - protein, 6 aa, synthetic construct
LPGSGS

SEQ ID NO: 3604 - protein, 6 aa, synthetic construct
SPGSGS

SEQ ID NO: 3605 - protein, 6 aa, synthetic construct
LPGSGT

SEQ ID NO: 3606 - protein, 6 aa, synthetic construct
LPGSGS

SEQ ID NO: 3607 - protein, 6 aa, synthetic construct
LPGSGR

SEQ ID NO: 3608 - protein, 6 aa, synthetic construct
LPGSGR

SEQ ID NO: 3609 - protein, 6 aa, synthetic construct
LPGSGS

SEQ ID NO: 3610 - protein, 6 aa, synthetic construct
LPGSGS

SEQ ID NO: 3611 - protein, 6 aa, synthetic construct
LPGSGR

SEQ ID NO: 3612 - protein, 6 aa, synthetic construct
LPGSGS

SEQ ID NO: 3613 - protein, 6 aa, synthetic construct
LPGSGR

SEQ ID NO: 3614 - protein, 6 aa, synthetic construct
LPGSGS

SEQ ID NO: 3615 - protein, 6 aa, synthetic construct
LPGSDS

SEQ ID NO: 3616 - protein, 6 aa, synthetic construct
LPGSGS

SEQ ID NO: 3617 - protein, 6 aa, synthetic construct
FPGSGH

SEQ ID NO: 3618 - protein, 6 aa, synthetic construct
LPGSGS

SEQ ID NO: 3619 - protein, 6 aa, synthetic construct
LPGSGS

SEQ ID NO: 3620 - protein, 6 aa, synthetic construct
LPGSGY

SEQ ID NO: 3621 - protein, 6 aa, synthetic construct
LPGSGS

SEQ ID NO: 3622 - protein, 6 aa, synthetic construct
SPGSGS

SEQ ID NO: 3623 - protein, 6 aa, synthetic construct
LPGSGT

SEQ ID NO: 3624 - protein, 6 aa, synthetic construct
LPGSGS

SEQ ID NO: 3625 - protein, 6 aa, synthetic construct
LPGSGR

SEQ ID NO: 3626 - protein, 6 aa, synthetic construct
LPGSGS

SEQ ID NO: 3627 - protein, 6 aa, synthetic construct
LPGSGS

SEQ ID NO: 3628 - protein, 6 aa, synthetic construct
SSYNGA

SEQ ID NO: 3629 - protein, 6 aa, synthetic construct
SSYNGV

SEQ ID NO: 3630 - protein, 6 aa, synthetic construct
SSYNGV

SEQ ID NO: 3631 - protein, 6 aa, synthetic construct
SSYNGV

SEQ ID NO: 3632 - protein, 6 aa, synthetic construct
SSYNGA

SEQ ID NO: 3633 - protein, 6 aa, synthetic construct
SSYNGV

SEQ ID NO: 3634 - protein, 6 aa, synthetic construct
SSYNGV

SEQ ID NO: 3635 - protein, 6 aa, synthetic construct
SSYNGV

SEQ ID NO: 3636 - protein, 6 aa, synthetic construct
SSYNGV

SEQ ID NO: 3637 - protein, 6 aa, synthetic construct
SSYNGA

SEQ ID NO: 3638 - protein, 6 aa, synthetic construct
SSYNGA

SEQ ID NO: 3639 - protein, 6 aa, synthetic construct
SSYNGV

SEQ ID NO: 3640 - protein, 6 aa, synthetic construct
SSYNGA

SEQ ID NO: 3641 - protein, 5 aa, synthetic construct
WRGGS

SEQ ID NO: 3642 - protein, 5 aa, synthetic construct
WRGGS

SEQ ID NO: 3643 - protein, 5 aa, synthetic construct
WRGGS

SEQ ID NO: 3644 - protein, 5 aa, synthetic construct
WRGGS

SEQ ID NO: 3645 - protein, 5 aa, synthetic construct
WRGGS

SEQ ID NO: 3646 - protein, 5 aa, synthetic construct
WRGGS

SEQ ID NO: 3647 - protein, 5 aa, synthetic construct
WRGGS

SEQ ID NO: 3648 - protein, 5 aa, synthetic construct
WRGGS

SEQ ID NO: 3649 - protein, 5 aa, synthetic construct
WRGGS

SEQ ID NO: 3650 - protein, 5 aa, synthetic construct
WRGGS

SEQ ID NO: 3651 - protein, 5 aa, synthetic construct
WRGGS

SEQ ID NO: 3652 - protein, 5 aa, synthetic construct
WRGGS

SEQ ID NO: 3653 - protein, 6 aa, synthetic construct
HPNSGS

SEQ ID NO: 3654 - protein, 6 aa, synthetic construct
HPNSGS

SEQ ID NO: 3655 - protein, 6 aa, synthetic construct
HPNSDN

SEQ ID NO: 3656 - protein, 6 aa, synthetic construct
HPNSGT

SEQ ID NO: 3657 - protein, 6 aa, synthetic construct
HPNSGN

SEQ ID NO: 3658 - protein, 6 aa, synthetic construct
HPNSGS

SEQ ID NO: 3659 - protein, 6 aa, synthetic construct
HPNSGT

SEQ ID NO: 3660 - protein, 6 aa, synthetic construct
YPGSGS

SEQ ID NO: 3661 - protein, 6 aa, synthetic construct
YPGSGS

SEQ ID NO: 3662 - protein, 6 aa, synthetic construct
YPGSGS

SEQ ID NO: 3663 - protein, 6 aa, synthetic construct
YPGSGS

SEQ ID NO: 3664 - protein, 6 aa, synthetic construct
YPGSGS

SEQ ID NO: 3665 - protein, 6 aa, synthetic construct
YPGSGS

SEQ ID NO: 3666 - protein, 6 aa, synthetic construct
YPGSGS

SEQ ID NO: 3667 - protein, 6 aa, synthetic construct
YPGSGS

SEQ ID NO: 3668 - protein, 6 aa, synthetic construct
YPGSGS

SEQ ID NO: 3669 - protein, 6 aa, synthetic construct
DPSDSE

SEQ ID NO: 3670 - protein, 6 aa, synthetic construct
DPSDSE

SEQ ID NO: 3671 - protein, 6 aa, synthetic construct
DPSDSE

SEQ ID NO: 3672 - protein, 6 aa, synthetic construct
HPNSGS

SEQ ID NO: 3673 - protein, 6 aa, synthetic construct
HPNSDS

SEQ ID NO: 3674 - protein, 6 aa, synthetic construct
HPNSGS

SEQ ID NO: 3675 - protein, 6 aa, synthetic construct
HPNSGS

SEQ ID NO: 3676 - protein, 6 aa, synthetic construct
HPNSGS

SEQ ID NO: 3677 - protein, 6 aa, synthetic construct
YPSDSY

SEQ ID NO: 3678 - protein, 6 aa, synthetic construct
YPSDSY

SEQ ID NO: 3679 - protein, 6 aa, synthetic construct
YPSDSY

SEQ ID NO: 3680 - protein, 6 aa, synthetic construct
YPGSGS

SEQ ID NO: 3681 - protein, 6 aa, synthetic construct
YPGSGS

SEQ ID NO: 3682 - protein, 6 aa, synthetic construct
YPGSGS

SEQ ID NO: 3683 - protein, 6 aa, synthetic construct
YPGSGS

SEQ ID NO: 3684 - protein, 6 aa, synthetic construct
YPGSGS

SEQ ID NO: 3685 - protein, 6 aa, synthetic construct
YPGSGS

SEQ ID NO: 3686 - protein, 6 aa, synthetic construct
YPGSGS

SEQ ID NO: 3687 - protein, 6 aa, synthetic construct
YPGSGS

SEQ ID NO: 3688 - protein, 6 aa, synthetic construct
YPGSGS

SEQ ID NO: 3689 - protein, 5 aa, synthetic construct
WAGGI

SEQ ID NO: 3690 - protein, 5 aa, synthetic construct
WAGGI

SEQ ID NO: 3691 - protein, 5 aa, synthetic construct
WAGGT

SEQ ID NO: 3692 - protein, 5 aa, synthetic construct
WAGGI

SEQ ID NO: 3693 - protein, 5 aa, synthetic construct
WAGGI

SEQ ID NO: 3694 - protein, 5 aa, synthetic construct
WAGGT

SEQ ID NO: 3695 - protein, 6 aa, synthetic construct
DPSDSE

SEQ ID NO: 3696 - protein, 6 aa, synthetic construct
DPSDSE

SEQ ID NO: 3697 - protein, 6 aa, synthetic construct
DPSDSE

SEQ ID NO: 3698 - protein, 6 aa, synthetic construct
DPENGD

SEQ ID NO: 3699 - protein, 6 aa, synthetic construct
DPENGD

SEQ ID NO: 3700 - protein, 6 aa, synthetic construct
DPENGD

SEQ ID NO: 3701 - protein, 6 aa, synthetic construct
DPENGD

SEQ ID NO: 3702 - protein, 6 aa, synthetic construct
DPENGD

SEQ ID NO: 3703 - protein, 6 aa, synthetic construct
DPENGD

SEQ ID NO: 3704 - protein, 6 aa, synthetic construct
DPANGN

SEQ ID NO: 3705 - protein, 6 aa, synthetic construct
NPSNGD

SEQ ID NO: 3706 - protein, 6 aa, synthetic construct
NPSNGG

SEQ ID NO: 3707 - protein, 6 aa, synthetic construct
DPEDGD

SEQ ID NO: 3708 - protein, 6 aa, synthetic construct
YPGSGS

SEQ ID NO: 3709 - protein, 6 aa, synthetic construct
YPGSGS

SEQ ID NO: 3710 - protein, 6 aa, synthetic construct
STYYGD

SEQ ID NO: 3711 - protein, 6 aa, synthetic construct
DPSDSY

SEQ ID NO: 3712 - protein, 6 aa, synthetic construct
DPSDSY

SEQ ID NO: 3713 - protein, 6 aa, synthetic construct
HPSDSD

SEQ ID NO: 3714 - protein, 6 aa, synthetic construct
YPGSGS

SEQ ID NO: 3715 - protein, 6 aa, synthetic construct
SSGGSY

SEQ ID NO: 3716 - protein, 4 aa, synthetic construct
WNND

SEQ ID NO: 3717 - protein, 6 aa, synthetic construct
NTYTGE

SEQ ID NO: 3718 - protein, 6 aa, synthetic construct
NTYTGE

SEQ ID NO: 3719 - protein, 6 aa, synthetic construct
DPETGG

SEQ ID NO: 3720 - protein, 6 aa, synthetic construct
DPETGG

SEQ ID NO: 3721 - protein, 6 aa, synthetic construct
DPSDSY

SEQ ID NO: 3722 - protein, 5 aa, synthetic construct
YWDDD

SEQ ID NO: 3723 - protein, 6 aa, synthetic construct
HPNSGN

SEQ ID NO: 3724 - protein, 6 aa, synthetic construct
HPNSGN

SEQ ID NO: 3725 - protein, 6 aa, synthetic construct
HPNSGS

SEQ ID NO: 3726 - protein, 6 aa, synthetic construct
YPGSGS

SEQ ID NO: 3727 - protein, 6 aa, synthetic construct
YPGSGS

SEQ ID NO: 3728 - protein, 6 aa, synthetic construct
HPNSGS

SEQ ID NO: 3729 - protein, 6 aa, synthetic construct
YPGNSD

SEQ ID NO: 3730 - protein, 6 aa, synthetic construct
YPGNSD

SEQ ID NO: 3731 - protein, 6 aa, synthetic construct
HPNSGS

SEQ ID NO: 3732 - protein, 6 aa, synthetic construct
YPGSGS

SEQ ID NO: 3733 - protein, 6 aa, synthetic construct
SDGGSY

SEQ ID NO: 3734 - protein, 6 aa, synthetic construct
NTETGE

SEQ ID NO: 3735 - protein, 6 aa, synthetic construct
SSGGSY

SEQ ID NO: 3736 - protein, 6 aa, synthetic construct
SSGGSY

SEQ ID NO: 3737 - protein, 6 aa, synthetic construct
DPSDSE

SEQ ID NO: 3738 - protein, 6 aa, synthetic construct
DPSDSE

SEQ ID NO: 3739 - protein, 6 aa, synthetic construct
HPNSGN

SEQ ID NO: 3740 - protein, 6 aa, synthetic construct
HPNSGN

SEQ ID NO: 3741 - protein, 6 aa, synthetic construct
HPNSGS

SEQ ID NO: 3742 - protein, 6 aa, synthetic construct
HPNSGS

SEQ ID NO: 3743 - protein, 5 aa, synthetic construct
WSGGS

SEQ ID NO: 3744 - protein, 5 aa, synthetic construct
WSGGS

SEQ ID NO: 3745 - protein, 6 aa, synthetic construct
YSGNGD

SEQ ID NO: 3746 - protein, 5 aa, synthetic construct
YWDDD

SEQ ID NO: 3747 - protein, 6 aa, synthetic construct
HPNSGS

SEQ ID NO: 3748 - protein, 6 aa, synthetic construct
SSGGSY

SEQ ID NO: 3749 - protein, 6 aa, synthetic construct
SSGGSY

SEQ ID NO: 3750 - protein, 6 aa, synthetic construct
HPNSGT

SEQ ID NO: 3751 - protein, 6 aa, synthetic construct
SSGGSY

SEQ ID NO: 3752 - protein, 6 aa, synthetic construct
SSGGSY

SEQ ID NO: 3753 - protein, 6 aa, synthetic construct
HPNSGS

SEQ ID NO: 3754 - protein, 6 aa, synthetic construct
HPNSGS

SEQ ID NO: 3755 - protein, 6 aa, synthetic construct
DPSDSE

SEQ ID NO: 3756 - protein, 6 aa, synthetic construct
DPSDSE

SEQ ID NO: 3757 - protein, 6 aa, synthetic construct
DPEDGE

SEQ ID NO: 3758 - protein, 6 aa, synthetic construct
DPEDGE

SEQ ID NO: 3759 - protein, 6 aa, synthetic construct
NTNTGE

SEQ ID NO: 3760 - protein, 6 aa, synthetic construct
NTNTGE

SEQ ID NO: 3761 - protein, 6 aa, synthetic construct
NTNTGE

SEQ ID NO: 3762 - protein, 6 aa, synthetic construct
NPSSGY

SEQ ID NO: 3763 - protein, 6 aa, synthetic construct
NPSSGY

SEQ ID NO: 3764 - protein, 5 aa, synthetic construct
WAGGS

SEQ ID NO: 3765 - protein, 5 aa, synthetic construct
WAGGS

SEQ ID NO: 3766 - protein, 6 aa, synthetic construct
DPSDSE

SEQ ID NO: 3767 - protein, 6 aa, synthetic construct
DPSDSE

SEQ ID NO: 3768 - protein, 6 aa, synthetic construct
YPGSGS

SEQ ID NO: 3769 - protein, 6 aa, synthetic construct
SSGGSY

SEQ ID NO: 3770 - protein, 6 aa, synthetic construct
HPNSGS

SEQ ID NO: 3771 - protein, 6 aa, synthetic construct
HPNSGS

SEQ ID NO: 3772 - protein, 6 aa, synthetic construct
HPNSGS

SEQ ID NO: 3773 - protein, 6 aa, synthetic construct
HPNSGS

SEQ ID NO: 3774 - protein, 6 aa, synthetic construct
HPNSGS

SEQ ID NO: 3775 - protein, 6 aa, synthetic construct
HPNSGS

SEQ ID NO: 3776 - protein, 6 aa, synthetic construct
DPSDSE

SEQ ID NO: 3777 - protein, 6 aa, synthetic construct
DPSDSE

SEQ ID NO: 3778 - protein, 6 aa, synthetic construct
HPNSGS

SEQ ID NO: 3779 - protein, 6 aa, synthetic construct
HPNSGS

SEQ ID NO: 3780 - protein, 6 aa, synthetic construct
HPNSGS

SEQ ID NO: 3781 - protein, 6 aa, synthetic construct
HPNSGS

SEQ ID NO: 3782 - protein, 6 aa, synthetic construct
SSGGSY

SEQ ID NO: 3783 - protein, 6 aa, synthetic construct
SSGGSY

SEQ ID NO: 3784 - protein, 6 aa, synthetic construct
SSGGSY

SEQ ID NO: 3785 - protein, 6 aa, synthetic construct
DPANGN

SEQ ID NO: 3786 - protein, 6 aa, synthetic construct
NSNGGS

SEQ ID NO: 3787 - protein, 6 aa, synthetic construct
YPNNGG

SEQ ID NO: 3788 - protein, 5 aa, synthetic construct
WSGGS

SEQ ID NO: 3789 - protein, 6 aa, synthetic construct
LPGSGS

SEQ ID NO: 3790 - protein, 6 aa, synthetic construct
DPETGG

SEQ ID NO: 3791 - protein, 6 aa, synthetic construct
NSNGGS

SEQ ID NO: 3792 - protein, 5 aa, synthetic construct
SSGGS

SEQ ID NO: 3793 - protein, 6 aa, synthetic construct
DPANGN

SEQ ID NO: 3794 - protein, 6 aa, synthetic construct
NSNGGS

SEQ ID NO: 3795 - protein, 8 aa, synthetic construct
RSKSDNYA

SEQ ID NO: 3796 - protein, 5 aa, synthetic construct
SYDGS

SEQ ID NO: 3797 - protein, 6 aa, synthetic construct
NTETGE

SEQ ID NO: 3798 - protein, 6 aa, synthetic construct
NTETGE

SEQ ID NO: 3799 - protein, 6 aa, synthetic construct
DPYDSE

SEQ ID NO: 3800 - protein, 6 aa, synthetic construct
NPYNGG

SEQ ID NO: 3801 - protein, 5 aa, synthetic construct
SSGGS

SEQ ID NO: 3802 - protein, 6 aa, synthetic construct
SSGGSY

SEQ ID NO: 3803 - protein, 5 aa, synthetic construct
SSGGT

SEQ ID NO: 3804 - protein, 5 aa, synthetic construct
WAGGS

SEQ ID NO: 3805 - protein, 5 aa, synthetic construct
SYSGS

SEQ ID NO: 3806 - protein, 6 aa, synthetic construct
DPETGG

SEQ ID NO: 3807 - protein, 5 aa, synthetic construct
SYDGS

SEQ ID NO: 3808 - protein, 6 aa, synthetic construct
NSNGGS

SEQ ID NO: 3809 - protein, 6 aa, synthetic construct
DPETDN

SEQ ID NO: 3810 - protein, 6 aa, synthetic construct
DPETDN

SEQ ID NO: 3811 - protein, 6 aa, synthetic construct
SSGGSY

SEQ ID NO: 3812 - protein, 6 aa, synthetic construct
SSGGSY

SEQ ID NO: 3813 - protein, 6 aa, synthetic construct
SNGGSY

SEQ ID NO: 3814 - protein, 5 aa, synthetic construct
SYDGS

SEQ ID NO: 3815 - protein, 8 aa, synthetic construct
RSKSNNYA

SEQ ID NO: 3816 - protein, 6 aa, synthetic construct
SSGGSY

SEQ ID NO: 3817 - protein, 6 aa, synthetic construct
DPETGG

SEQ ID NO: 3818 - protein, 6 aa, synthetic construct
SSGGSY

SEQ ID NO: 3819 - protein, 6 aa, synthetic construct
SSGGSY

SEQ ID NO: 3820 - protein, 5 aa, synthetic construct
WSGGS

SEQ ID NO: 3821 - protein, 6 aa, synthetic construct
HPNSGS

SEQ ID NO: 3822 - protein, 6 aa, synthetic construct
NPNNGG

SEQ ID NO: 3823 - protein, 6 aa, synthetic construct
LPGSGS

SEQ ID NO: 3824 - protein, 6 aa, synthetic construct
LPGSGS

SEQ ID NO: 3825 - protein, 5 aa, synthetic construct
WSGGS

SEQ ID NO: 3826 - protein, 5 aa, synthetic construct
WSGGS

SEQ ID NO: 3827 - protein, 6 aa, synthetic construct
DPSDSY

SEQ ID NO: 3828 - protein, 6 aa, synthetic construct
DPSDSY

SEQ ID NO: 3829 - protein, 5 aa, synthetic construct
SYDGS

SEQ ID NO: 3830 - protein, 5 aa, synthetic construct
WSGGS

SEQ ID NO: 3831 - protein, 6 aa, synthetic construct
YPGSGS

SEQ ID NO: 3832 - protein, 6 aa, synthetic construct
NPNYGT

SEQ ID NO: 3833 - protein, 6 aa, synthetic construct
DPSDSY

SEQ ID NO: 3834 - protein, 6 aa, synthetic construct
NPNYGT

SEQ ID NO: 3835 - protein, 5 aa, synthetic construct
WRGGS

SEQ ID NO: 3836 - protein, 5 aa, synthetic construct
WSGGS

SEQ ID NO: 3837 - protein, 6 aa, synthetic construct
DPSDSY

SEQ ID NO: 3838 - protein, 6 aa, synthetic construct
DPANGN

SEQ ID NO: 3839 - protein, 6 aa, synthetic construct
DPSDSE

SEQ ID NO: 3840 - protein, 6 aa, synthetic construct
NPNNGG

SEQ ID NO: 3841 - protein, 6 aa, synthetic construct
YPRSGN

SEQ ID NO: 3842 - protein, 5 aa, synthetic construct
WSGGS

SEQ ID NO: 3843 - protein, 6 aa, synthetic construct
NPNYGT

SEQ ID NO: 3844 - protein, 6 aa, synthetic construct
DPETGG

SEQ ID NO: 3845 - protein, 6 aa, synthetic construct
DPSDSY

SEQ ID NO: 3846 - protein, 6 aa, synthetic construct
SPGGGS

SEQ ID NO: 3847-4104 - skipped (258 entries)

SEQ ID NO: 4105 - protein, 13 aa, synthetic construct
ARRAYGYDGGFDY

SEQ ID NO: 4106 - protein, 13 aa, synthetic construct
ARRAYGYDEGFDY

SEQ ID NO: 4107 - protein, 13 aa, synthetic construct
ARRAYGYDEGFDY

SEQ ID NO: 4108 - protein, 13 aa, synthetic construct
ARRAYGYDGGFDY

SEQ ID NO: 4109 - protein, 13 aa, synthetic construct
ARRGYGYDEGFDY

SEQ ID NO: 4110 - protein, 13 aa, synthetic construct
ARRGYGYDEGFDY

SEQ ID NO: 4111 - protein, 13 aa, synthetic construct
ARRGYGYDEGFDY

SEQ ID NO: 4112 - protein, 13 aa, synthetic construct
ARRGYGYDEGFDY

SEQ ID NO: 4113 - protein, 13 aa, synthetic construct
ARRGYGYDEGFDY

SEQ ID NO: 4114 - protein, 13 aa, synthetic construct
ARRGYGYDEGFDY

SEQ ID NO: 4115 - protein, 13 aa, synthetic construct
ARRAYGYDEGFDY

SEQ ID NO: 4116 - protein, 13 aa, synthetic construct
ARRGYGYDEGFDY

SEQ ID NO: 4117 - protein, 13 aa, synthetic construct
ARRAYGYDEGFDY

SEQ ID NO: 4118 - protein, 13 aa, synthetic construct
ARRGYGYDEGFDY

SEQ ID NO: 4119 - protein, 13 aa, synthetic construct
ARRAYGYDAGFDY

SEQ ID NO: 4120 - protein, 13 aa, synthetic construct
ARRGYGYDEGFDY

SEQ ID NO: 4121 - protein, 13 aa, synthetic construct
ARRGYGYDEGFDY

SEQ ID NO: 4122 - protein, 13 aa, synthetic construct
ARRGYGYDEGFDY

SEQ ID NO: 4123 - protein, 13 aa, synthetic construct
ARRAYGYDEGFDY

SEQ ID NO: 4124 - protein, 13 aa, synthetic construct
ARRAYGYDEGFDY

SEQ ID NO: 4125 - protein, 13 aa, synthetic construct
ARRGYGYDEGFDY

SEQ ID NO: 4126 - protein, 13 aa, synthetic construct
ARRAYGYDEGFDY

SEQ ID NO: 4127 - protein, 13 aa, synthetic construct
ARRGYGYDEGFDY

SEQ ID NO: 4128 - protein, 13 aa, synthetic construct
ARRAYGYDGGFDY

SEQ ID NO: 4129 - protein, 13 aa, synthetic construct
ARRAYGYDEGFDY

SEQ ID NO: 4130 - protein, 13 aa, synthetic construct
ARRAYGYDGGFDY

SEQ ID NO: 4131 - protein, 13 aa, synthetic construct
ARRGYGYDEGFDY

SEQ ID NO: 4132 - protein, 13 aa, synthetic construct
ARRGYGYDEGFDY

SEQ ID NO: 4133 - protein, 13 aa, synthetic construct
ARRGYGYDEGFDY

SEQ ID NO: 4134 - protein, 13 aa, synthetic construct
ARRGYGYDEGFDY

SEQ ID NO: 4135 - protein, 13 aa, synthetic construct
ARRGYGYDEGFDY

SEQ ID NO: 4136 - protein, 13 aa, synthetic construct
ARRGYGYDEGFDY

SEQ ID NO: 4137 - protein, 13 aa, synthetic construct
ARRAYGYDAGFDY

SEQ ID NO: 4138 - protein, 13 aa, synthetic construct
ARRGYGYDEGFDY

SEQ ID NO: 4139 - protein, 13 aa, synthetic construct
ARRGYGYDEGFDY

SEQ ID NO: 4140 - protein, 13 aa, synthetic construct
ARRGYGYDEGFDY

SEQ ID NO: 4141 - protein, 13 aa, synthetic construct
ARRGYGYDEGFDY

SEQ ID NO: 4142 - protein, 11 aa, synthetic construct
ARGRYGEYFDY

SEQ ID NO: 4143 - protein, 11 aa, synthetic construct
ARGRYGDYFDY

SEQ ID NO: 4144 - protein, 11 aa, synthetic construct
ARGRYGDYFDY

SEQ ID NO: 4145 - protein, 11 aa, synthetic construct
ARGRYGDYFDY

SEQ ID NO: 4146 - protein, 11 aa, synthetic construct
ARGRYGDYFDY

SEQ ID NO: 4147 - protein, 11 aa, synthetic construct
ARGRYGDYFDY

SEQ ID NO: 4148 - protein, 11 aa, synthetic construct
ARGRYGDYFDY

SEQ ID NO: 4149 - protein, 11 aa, synthetic construct
ARGRYGDYFDY

SEQ ID NO: 4150 - protein, 11 aa, synthetic construct
ARGRYGDYFDY

SEQ ID NO: 4151 - protein, 11 aa, synthetic construct
ARGRYGDYFDY

SEQ ID NO: 4152 - protein, 11 aa, synthetic construct
ARGRYGDYFDY

SEQ ID NO: 4153 - protein, 11 aa, synthetic construct
ARGRYGDYFDY

SEQ ID NO: 4154 - protein, 11 aa, synthetic construct
ARGRYGEYFDY

SEQ ID NO: 4155 - protein, 12 aa, synthetic construct
AKNLYGHYVMDY

SEQ ID NO: 4156 - protein, 12 aa, synthetic construct
AKNLYGHYVMDY

SEQ ID NO: 4157 - protein, 12 aa, synthetic construct
AKNLYGHYVMDY

SEQ ID NO: 4158 - protein, 12 aa, synthetic construct
AKNLYGHYVMDY

SEQ ID NO: 4159 - protein, 12 aa, synthetic construct
AKNLYGHYVMDY

SEQ ID NO: 4160 - protein, 12 aa, synthetic construct
AKNLYGHYVMDY

SEQ ID NO: 4161 - protein, 12 aa, synthetic construct
AKNLYGHYVMDY

SEQ ID NO: 4162 - protein, 12 aa, synthetic construct
AKNLYGHYVMDY

SEQ ID NO: 4163 - protein, 12 aa, synthetic construct
AKNLYGHYVMDY

SEQ ID NO: 4164 - protein, 12 aa, synthetic construct
AKNLYGHYVMDY

SEQ ID NO: 4165 - protein, 12 aa, synthetic construct
AKNLYGHYVMDY

SEQ ID NO: 4166 - protein, 12 aa, synthetic construct
AKNLYGHYVMDY

SEQ ID NO: 4167 - protein, 11 aa, synthetic construct
ARWGDGYSFAY

SEQ ID NO: 4168 - protein, 11 aa, synthetic construct
ARWGDGYSFAY

SEQ ID NO: 4169 - protein, 11 aa, synthetic construct
ARWGDGYSFAY

SEQ ID NO: 4170 - protein, 11 aa, synthetic construct
ARWGDGYSFAY

SEQ ID NO: 4171 - protein, 11 aa, synthetic construct
ARWGDGYSFAY

SEQ ID NO: 4172 - protein, 11 aa, synthetic construct
ARWGDGYSFAY

SEQ ID NO: 4173 - protein, 11 aa, synthetic construct
ARWGDGYSFAY

SEQ ID NO: 4174 - protein, 12 aa, synthetic construct
ARRGERGPWFAY

SEQ ID NO: 4175 - protein, 12 aa, synthetic construct
ARRGERGPWFAY

SEQ ID NO: 4176 - protein, 12 aa, synthetic construct
ARRGERGPWFAY

SEQ ID NO: 4177 - protein, 12 aa, synthetic construct
ARRGERGPWFAY

SEQ ID NO: 4178 - protein, 12 aa, synthetic construct
ARRGERGPWFAY

SEQ ID NO: 4179 - protein, 12 aa, synthetic construct
ARRGERGPWFAY

SEQ ID NO: 4180 - protein, 12 aa, synthetic construct
ARRGERGPWFAY

SEQ ID NO: 4181 - protein, 12 aa, synthetic construct
ARRGERGPWFAY

SEQ ID NO: 4182 - protein, 12 aa, synthetic construct
ARRGERGPWFAY

SEQ ID NO: 4183 - protein, 11 aa, synthetic construct
ATYDVYYRFAY

SEQ ID NO: 4184 - protein, 11 aa, synthetic construct
ATYDGYYRFAY

SEQ ID NO: 4185 - protein, 11 aa, synthetic construct
ATYDIYYRFAY

SEQ ID NO: 4186 - protein, 10 aa, synthetic construct
ARPGGYGFVY

SEQ ID NO: 4187 - protein, 10 aa, synthetic construct
ARPGGYGFAD

SEQ ID NO: 4188 - protein, 10 aa, synthetic construct
ARPGGYGFTY

SEQ ID NO: 4189 - protein, 10 aa, synthetic construct
ARPGGYGFAY

SEQ ID NO: 4190 - protein, 10 aa, synthetic construct
ARPGGYGFAY

SEQ ID NO: 4191 - protein, 8 aa, synthetic construct
TRGNYIDY

SEQ ID NO: 4192 - protein, 8 aa, synthetic construct
TRGNYIDY

SEQ ID NO: 4193 - protein, 8 aa, synthetic construct
TRGNYIDY

SEQ ID NO: 4194 - protein, 10 aa, synthetic construct
ARPGDLGFAY

SEQ ID NO: 4195 - protein, 10 aa, synthetic construct
ARPGDLGFAY

SEQ ID NO: 4196 - protein, 10 aa, synthetic construct
ARPGDLGFAY

SEQ ID NO: 4197 - protein, 10 aa, synthetic construct
ARPGDLGFAY

SEQ ID NO: 4198 - protein, 10 aa, synthetic construct
ARPGDLGFAY

SEQ ID NO: 4199 - protein, 10 aa, synthetic construct
ARPGDLGFAY

SEQ ID NO: 4200 - protein, 10 aa, synthetic construct
ARPGDLGFAY

SEQ ID NO: 4201 - protein, 10 aa, synthetic construct
ARPGDLGFAY

SEQ ID NO: 4202 - protein, 10 aa, synthetic construct
ARPGDLGFAY

SEQ ID NO: 4203 - protein, 14 aa, synthetic construct
ARGDGYDDGYAMDY

SEQ ID NO: 4204 - protein, 14 aa, synthetic construct
ARGDGYDDGYAMDY

SEQ ID NO: 4205 - protein, 14 aa, synthetic construct
ARGDGYDDGYAMDY

SEQ ID NO: 4206 - protein, 14 aa, synthetic construct
ARGDGYDDGYAMDY

SEQ ID NO: 4207 - protein, 14 aa, synthetic construct
ARGDGYDDGYAMDY

SEQ ID NO: 4208 - protein, 14 aa, synthetic construct
ARGDGYDDGYAMDY

SEQ ID NO: 4209 - protein, 6 aa, synthetic construct
ARTRNY

SEQ ID NO: 4210 - protein, 6 aa, synthetic construct
ARTRNY

SEQ ID NO: 4211 - protein, 6 aa, synthetic construct
ARTRNY

SEQ ID NO: 4212 - protein, 13 aa, synthetic construct
NAPLLRYSSAMDY

SEQ ID NO: 4213 - protein, 13 aa, synthetic construct
NAPLLRYSSSMDY

SEQ ID NO: 4214 - protein, 13 aa, synthetic construct
NVALLRYSSAMDY

SEQ ID NO: 4215 - protein, 13 aa, synthetic construct
NAPLLRYSSAMDY

SEQ ID NO: 4216 - protein, 13 aa, synthetic construct
NAPLLRYSSSMDY

SEQ ID NO: 4217 - protein, 13 aa, synthetic construct
NVALLRYSSAMDY

SEQ ID NO: 4218 - protein, 16 aa, synthetic construct
ARGPDDGYFYYYSMDY

SEQ ID NO: 4219 - protein, 15 aa, synthetic construct
TSYYTHEAYYYAMDC

SEQ ID NO: 4220 - protein, 15 aa, synthetic construct
TSYYTHETYYYAMDY

SEQ ID NO: 4221 - protein, 11 aa, synthetic construct
TPYSIYDAMDY

SEQ ID NO: 4222 - protein, 12 aa, synthetic construct
ARRGERGPWFAY

SEQ ID NO: 4223 - protein, 12 aa, synthetic construct
ARRGERGPWFAY

SEQ ID NO: 4224 - protein, 16 aa, synthetic construct
ARQMDYDYTYYYAMDY

SEQ ID NO: 4225 - protein, 15 aa, synthetic construct
ARAEYGYGNYPWFAY

SEQ ID NO: 4226 - protein, 15 aa, synthetic construct
ARAEYGYGNYPWFAY

SEQ ID NO: 4227 - protein, 13 aa, synthetic construct
AIPYYYGGWYFDV

SEQ ID NO: 4228 - protein, 10 aa, synthetic construct
ARMDGPWFAY

SEQ ID NO: 4229 - protein, 13 aa, synthetic construct
ARLYDAHWDYFDY

SEQ ID NO: 4230 - protein, 13 aa, synthetic construct
AWRPYYRYDSFAY

SEQ ID NO: 4231 - protein, 11 aa, synthetic construct
ARKYYDYEFAY

SEQ ID NO: 4232 - protein, 11 aa, synthetic construct
ARKYYDYEFAY

SEQ ID NO: 4233 - protein, 11 aa, synthetic construct
TRLGDYDVMDY

SEQ ID NO: 4234 - protein, 11 aa, synthetic construct
TRLGDYDVMDY

SEQ ID NO: 4235 - protein, 12 aa, synthetic construct
ARAGRYGSSFDY

SEQ ID NO: 4236 - protein, 14 aa, synthetic construct
AGRPDDYDGAWFPY

SEQ ID NO: 4237 - protein, 13 aa, synthetic construct
AIYYDYDAYYFDY

SEQ ID NO: 4238 - protein, 13 aa, synthetic construct
AIYYDYDAYYFDY

SEQ ID NO: 4239 - protein, 11 aa, synthetic construct
ANPYYGYDVGY

SEQ ID NO: 4240 - protein, 10 aa, synthetic construct
AREEKIYFDY

SEQ ID NO: 4241 - protein, 10 aa, synthetic construct
AREEKIYFDY

SEQ ID NO: 4242 - protein, 10 aa, synthetic construct
ARYDGYWFDY

SEQ ID NO: 4243 - protein, 12 aa, synthetic construct
TSLITTAYYFDY

SEQ ID NO: 4244 - protein, 12 aa, synthetic construct
TSLITTAYYFDY

SEQ ID NO: 4245 - protein, 17 aa, synthetic construct
APETGDYGSSYVWYFDV

SEQ ID NO: 4246 - protein, 10 aa, synthetic construct
ARGKVTRFAY

SEQ ID NO: 4247 - protein, 13 aa, synthetic construct
ARDQDSNWEYFDY

SEQ ID NO: 4248 - protein, 11 aa, synthetic construct
ARESWDRAMDY

SEQ ID NO: 4249 - protein, 13 aa, synthetic construct
ARHEEANWAWFAY

SEQ ID NO: 4250 - protein, 13 aa, synthetic construct
ARHEEANWAWFAY

SEQ ID NO: 4251 - protein, 9 aa, synthetic construct
AIPYYAMDY

SEQ ID NO: 4252 - protein, 9 aa, synthetic construct
AIPYYAMDY

SEQ ID NO: 4253 - protein, 13 aa, synthetic construct
ATYYGNYVWYFDV

SEQ ID NO: 4254 - protein, 13 aa, synthetic construct
ATYYGNYVWYFDV

SEQ ID NO: 4255 - protein, 12 aa, synthetic construct
ASYGSSYWYFDV

SEQ ID NO: 4256 - protein, 12 aa, synthetic construct
ASYGSSYWYFDV

SEQ ID NO: 4257 - protein, 15 aa, synthetic construct
ASYYGSSRSYWYLDV

SEQ ID NO: 4258 - protein, 15 aa, synthetic construct
ASYYGSSRSYWYLDV

SEQ ID NO: 4259 - protein, 15 aa, synthetic construct
ARDYYGSSHLWYFDV

SEQ ID NO: 4260 - protein, 14 aa, synthetic construct
ARRAHYDYGWYFDV

SEQ ID NO: 4261 - protein, 11 aa, synthetic construct
AGYDYDWYFDV

SEQ ID NO: 4262 - protein, 13 aa, synthetic construct
TRHDDSSYDWFAY

SEQ ID NO: 4263 - protein, 13 aa, synthetic construct
ARHEDSNYHYFDY

SEQ ID NO: 4264 - protein, 11 aa, synthetic construct
ARFGDGYHFDY

SEQ ID NO: 4265 - protein, 13 aa, synthetic construct
ARQNDSSWAWFAY

SEQ ID NO: 4266 - protein, 13 aa, synthetic construct
ARQNDSSWAWFAY

SEQ ID NO: 4267 - protein, 13 aa, synthetic construct
ALPYSNYGWYFDV

SEQ ID NO: 4268 - protein, 13 aa, synthetic construct
ALPYSNYGWYFDV

SEQ ID NO: 4269 - protein, 13 aa, synthetic construct
ARDYYGSYWYFDV

SEQ ID NO: 4270 - protein, 13 aa, synthetic construct
ARDYYGSYWYFDV

SEQ ID NO: 4271 - protein, 11 aa, synthetic construct
AAYGNSAWFAY

SEQ ID NO: 4272 - protein, 11 aa, synthetic construct
AAYGNSAWFAY

SEQ ID NO: 4273 - protein, 9 aa, synthetic construct
ARWYPYFDY

SEQ ID NO: 4274 - protein, 9 aa, synthetic construct
ARWYPYFDY

SEQ ID NO: 4275 - protein, 9 aa, synthetic construct
ARWYPYFDY

SEQ ID NO: 4276 - protein, 14 aa, synthetic construct
ARSDGSSGNWYFDV

SEQ ID NO: 4277 - protein, 14 aa, synthetic construct
ARSDGSSGNWYFDV

SEQ ID NO: 4278 - protein, 12 aa, synthetic construct
AREGGYTGYFDV

SEQ ID NO: 4279 - protein, 12 aa, synthetic construct
AREGGYTGYFDV

SEQ ID NO: 4280 - protein, 13 aa, synthetic construct
AYSNYVPYYAMDY

SEQ ID NO: 4281 - protein, 13 aa, synthetic construct
AYSNYVPYYAMDY

SEQ ID NO: 4282 - protein, 7 aa, synthetic construct
ARRGFDY

SEQ ID NO: 4283 - protein, 13 aa, synthetic construct
ARHNYSNWDWFAY

SEQ ID NO: 4284 - protein, 15 aa, synthetic construct
ARDYYGSGYGYYFDY

SEQ ID NO: 4285 - protein, 15 aa, synthetic construct
ARDYYGSSYGWYFDV

SEQ ID NO: 4286 - protein, 15 aa, synthetic construct
ARDYYGSSYGWYFDV

SEQ ID NO: 4287 - protein, 15 aa, synthetic construct
ASDYYGSSYGWYFDV

SEQ ID NO: 4288 - protein, 15 aa, synthetic construct
ARDYYGSSYGWYFDV

SEQ ID NO: 4289 - protein, 15 aa, synthetic construct
TRDYYGSGYGWYFDV

SEQ ID NO: 4290 - protein, 11 aa, synthetic construct
ATYDGYYRFAY

SEQ ID NO: 4291 - protein, 11 aa, synthetic construct
ATYDVYYRFAY

SEQ ID NO: 4292 - protein, 13 aa, synthetic construct
ARDYGNYDYAMDY

SEQ ID NO: 4293 - protein, 13 aa, synthetic construct
ARDYGNYDYAMDY

SEQ ID NO: 4294 - protein, 13 aa, synthetic construct
ARDYGNYDYAMDY

SEQ ID NO: 4295 - protein, 13 aa, synthetic construct
ARDYGNYDYAMDY

SEQ ID NO: 4296 - protein, 13 aa, synthetic construct
ASQLTGTWYYFDY

SEQ ID NO: 4297 - protein, 13 aa, synthetic construct
ASQLTGTWYYFDY

SEQ ID NO: 4298 - protein, 13 aa, synthetic construct
ASQLTGTWYYFDY

SEQ ID NO: 4299 - protein, 16 aa, synthetic construct
ARGPDDGYFYYYSMDY

SEQ ID NO: 4300 - protein, 12 aa, synthetic construct
ARQEGIGYAMDY

SEQ ID NO: 4301 - protein, 9 aa, synthetic construct
ARGGWLLGY

SEQ ID NO: 4302 - protein, 12 aa, synthetic construct
ARDGGIRGAMDY

SEQ ID NO: 4303 - protein, 13 aa, synthetic construct
ARRGYGYDEGFDY

SEQ ID NO: 4304 - protein, 10 aa, synthetic construct
TRNYDYAMDY

SEQ ID NO: 4305 - protein, 12 aa, synthetic construct
ARQEGIGYALDY

SEQ ID NO: 4306 - protein, 16 aa, synthetic construct
AREREWGVYYGSSLDY

SEQ ID NO: 4307 - protein, 8 aa, synthetic construct
ARSDGNYD

SEQ ID NO: 4308 - protein, 12 aa, synthetic construct
ARQEGIGYGMDY

SEQ ID NO: 4309 - protein, 11 aa, synthetic construct
VRHDGVVGFDV

SEQ ID NO: 4310 - protein, 7 aa, synthetic construct
ARGGGRG

SEQ ID NO: 4311 - protein, 13 aa, synthetic construct
ARDYYDYYYAMDY

SEQ ID NO: 4312 - protein, 11 aa, synthetic construct
ARESWDRAMDY

SEQ ID NO: 4313 - protein, 14 aa, synthetic construct
ARIYSDYDGAWFAY

SEQ ID NO: 4314 - protein, 9 aa, synthetic construct
ARGTVGFAY

SEQ ID NO: 4315 - protein, 16 aa, synthetic construct
AREREWGVFYGSSLDY

SEQ ID NO: 4316 - protein, 13 aa, synthetic construct
ARHDDSSYGYFDY

SEQ ID NO: 4317 - protein, 7 aa, synthetic construct
ARTMPDV

SEQ ID NO: 4318 - protein, 13 aa, synthetic construct
ARDTDGYYWAMDY

SEQ ID NO: 4319 - protein, 7 aa, synthetic construct
ARKWGDY

SEQ ID NO: 4320 - protein, 10 aa, synthetic construct
TRNYDYALDY

SEQ ID NO: 4321 - protein, 7 aa, synthetic construct
ARGGGRG

SEQ ID NO: 4322 - protein, 12 aa, synthetic construct
ARQEEIGYAMDY

SEQ ID NO: 4323 - protein, 10 aa, synthetic construct
ARSGNMGFTY

SEQ ID NO: 4324 - protein, 10 aa, synthetic construct
ARSGNMGFTY

SEQ ID NO: 4325 - protein, 13 aa, synthetic construct
ASQGGSSWGAMDY

SEQ ID NO: 4326 - protein, 13 aa, synthetic construct
ASQGGSSWGAMDY

SEQ ID NO: 4327 - protein, 11 aa, synthetic construct
ARHEITTRFAY

SEQ ID NO: 4328 - protein, 9 aa, synthetic construct
AREAGYFDY

SEQ ID NO: 4329 - protein, 10 aa, synthetic construct
VRQYGYDFDY

SEQ ID NO: 4330 - protein, 13 aa, synthetic construct
ARHKGVNWDYFDY

SEQ ID NO: 4331 - protein, 14 aa, synthetic construct
TRGDGNYDSWYFDV

SEQ ID NO: 4332 - protein, 12 aa, synthetic construct
ARLPVTTVVFDY

SEQ ID NO: 4333 - protein, 11 aa, synthetic construct
ARRPVVVPFDY

SEQ ID NO: 4334 - protein, 11 aa, synthetic construct
ARGWDADYFDY

SEQ ID NO: 4335 - protein, 8 aa, synthetic construct
TRYDYDDY

SEQ ID NO: 4336 - protein, 12 aa, synthetic construct
ARSELGLYAMDY

SEQ ID NO: 4337 - protein, 10 aa, synthetic construct
ARGRIHYFDY

SEQ ID NO: 4338 - protein, 10 aa, synthetic construct
ARGRIHYFDY

SEQ ID NO: 4339 - protein, 13 aa, synthetic construct
ARKGYGYDWYFDV

SEQ ID NO: 4340 - protein, 13 aa, synthetic construct
ARKGYGYDWYFDV

SEQ ID NO: 4341 - protein, 12 aa, synthetic construct
ARSSYYYYAMDY

SEQ ID NO: 4342 - protein, 12 aa, synthetic construct
ARSSYYYYAMDY

SEQ ID NO: 4343 - protein, 7 aa, synthetic construct
ARGGGRD

SEQ ID NO: 4344 - protein, 13 aa, synthetic construct
ARGGDYDSYAMDY

SEQ ID NO: 4345 - protein, 15 aa, synthetic construct
ARESVYDGYSWYFDV

SEQ ID NO: 4346 - protein, 13 aa, synthetic construct
ASTYDYDDWYFDV

SEQ ID NO: 4347 - protein, 12 aa, synthetic construct
ARSGNYLYAMDY

SEQ ID NO: 4348 - protein, 11 aa, synthetic construct
AREGTSWYFDV

SEQ ID NO: 4349 - protein, 13 aa, synthetic construct
AKKGDGYDWYFDV

SEQ ID NO: 4350 - protein, 15 aa, synthetic construct
AREGNYGSSYDAMDY

SEQ ID NO: 4351 - protein, 12 aa, synthetic construct
ARSSNYPYAMDY

SEQ ID NO: 4352 - protein, 7 aa, synthetic construct
AYYSGLY

SEQ ID NO: 4353 - protein, 15 aa, synthetic construct
ARRGQIYYGYSWFAY

SEQ ID NO: 4354 - protein, 13 aa, synthetic construct
ARSTVVADWYFDV

SEQ ID NO: 4355 - protein, 12 aa, synthetic construct
ARSGSSYGYFDV

SEQ ID NO: 4356 - protein, 13 aa, synthetic construct
ARKGGYDAYAMDY

SEQ ID NO: 4357 - protein, 14 aa, synthetic construct
AREGFITTVVAVDY

SEQ ID NO: 4358 - protein, 11 aa, synthetic construct
TREGNYDAMDY

SEQ ID NO: 4359 - protein, 10 aa, synthetic construct
ARWDYYGVDY

SEQ ID NO: 4360 - protein, 14 aa, synthetic construct
ASSLTATHTYEYDY

SEQ ID NO: 4361 - protein, 8 aa, synthetic construct
GYTFSSYW

SEQ ID NO: 4362 - protein, 8 aa, synthetic construct
GYTFSSYW

SEQ ID NO: 4363 - protein, 8 aa, synthetic construct
GYTFSSYW

SEQ ID NO: 4364 - protein, 8 aa, synthetic construct
AYTFSIYW

SEQ ID NO: 4365 - protein, 8 aa, synthetic construct
GYTFSSYW

SEQ ID NO: 4366 - protein, 8 aa, synthetic construct
GYTFSSYW

SEQ ID NO: 4367 - protein, 8 aa, synthetic construct
GYTFSSYW

SEQ ID NO: 4368 - protein, 8 aa, synthetic construct
GYTFSNYW

SEQ ID NO: 4369 - protein, 8 aa, synthetic construct
GYTFSSYW

SEQ ID NO: 4370 - protein, 8 aa, synthetic construct
GYTFSSYW

SEQ ID NO: 4371 - protein, 8 aa, synthetic construct
GYTFSSYW

SEQ ID NO: 4372 - protein, 8 aa, synthetic construct
GYTLSSYW

SEQ ID NO: 4373 - protein, 8 aa, synthetic construct
GYTFSSYW

SEQ ID NO: 4374 - protein, 8 aa, synthetic construct
GYTFSSYW

SEQ ID NO: 4375 - protein, 8 aa, synthetic construct
GYTFGTYW

SEQ ID NO: 4376 - protein, 8 aa, synthetic construct
GYTFSSYW

SEQ ID NO: 4377 - protein, 8 aa, synthetic construct
GYTFSSYW

SEQ ID NO: 4378 - protein, 8 aa, synthetic construct
GYTFSSYW

SEQ ID NO: 4379 - protein, 8 aa, synthetic construct
GYTFSSYW

SEQ ID NO: 4380 - protein, 8 aa, synthetic construct
GYTFSSYW

SEQ ID NO: 4381 - protein, 8 aa, synthetic construct
GYTFSSYW

SEQ ID NO: 4382 - protein, 8 aa, synthetic construct
GYTFSSYW

SEQ ID NO: 4383 - protein, 8 aa, synthetic construct
GYTFSSYW

SEQ ID NO: 4384 - protein, 8 aa, synthetic construct
GYTFSSYW

SEQ ID NO: 4385 - protein, 8 aa, synthetic construct
GYTFSSYW

SEQ ID NO: 4386 - protein, 8 aa, synthetic construct
AYTFSIYW

SEQ ID NO: 4387 - protein, 8 aa, synthetic construct
GYTFSSYW

SEQ ID NO: 4388 - protein, 8 aa, synthetic construct
GYTFSNYW

SEQ ID NO: 4389 - protein, 8 aa, synthetic construct
GYTFSSYW

SEQ ID NO: 4390 - protein, 8 aa, synthetic construct
GYTFSSYW

SEQ ID NO: 4391 - protein, 8 aa, synthetic construct
GYTLSSYW

SEQ ID NO: 4392 - protein, 8 aa, synthetic construct
GYTFSSYW

SEQ ID NO: 4393 - protein, 8 aa, synthetic construct
GYTFGTYW

SEQ ID NO: 4394 - protein, 8 aa, synthetic construct
GYTFSSYW

SEQ ID NO: 4395 - protein, 8 aa, synthetic construct
GYTFSSYW

SEQ ID NO: 4396 - protein, 8 aa, synthetic construct
GYTFSNYW

SEQ ID NO: 4397 - protein, 8 aa, synthetic construct
GYTFSSYW

SEQ ID NO: 4398 - protein, 8 aa, synthetic construct
GYSFTGYY

SEQ ID NO: 4399 - protein, 8 aa, synthetic construct
GYSFTGYY

SEQ ID NO: 4400 - protein, 8 aa, synthetic construct
GYSFTGYY

SEQ ID NO: 4401 - protein, 8 aa, synthetic construct
GYSFTGYY

SEQ ID NO: 4402 - protein, 8 aa, synthetic construct
GYSFTGYY

SEQ ID NO: 4403 - protein, 8 aa, synthetic construct
GYSFTGYY

SEQ ID NO: 4404 - protein, 8 aa, synthetic construct
GYSFTGYY

SEQ ID NO: 4405 - protein, 8 aa, synthetic construct
GYSFTGYY

SEQ ID NO: 4406 - protein, 8 aa, synthetic construct
GYSFTGYY

SEQ ID NO: 4407 - protein, 8 aa, synthetic construct
GYSFTGFY

SEQ ID NO: 4408 - protein, 8 aa, synthetic construct
GYSFTGYY

SEQ ID NO: 4409 - protein, 8 aa, synthetic construct
GYSFTGYY

SEQ ID NO: 4410 - protein, 8 aa, synthetic construct
GYSFTGYY

SEQ ID NO: 4411 - protein, 8 aa, synthetic construct
GFSLSSYG

SEQ ID NO: 4412 - protein, 8 aa, synthetic construct
GFSVTSYG

SEQ ID NO: 4413 - protein, 8 aa, synthetic construct
GFSLTSYG

SEQ ID NO: 4414 - protein, 8 aa, synthetic construct
GFSLTRYG

SEQ ID NO: 4415 - protein, 8 aa, synthetic construct
GFSVTTYG

SEQ ID NO: 4416 - protein, 8 aa, synthetic construct
GFSVTSYG

SEQ ID NO: 4417 - protein, 8 aa, synthetic construct
GFSLTRYG

SEQ ID NO: 4418 - protein, 8 aa, synthetic construct
GFSLSSYG

SEQ ID NO: 4419 - protein, 8 aa, synthetic construct
GFSVTSYG

SEQ ID NO: 4420 - protein, 8 aa, synthetic construct
GFSLTSYG

SEQ ID NO: 4421 - protein, 8 aa, synthetic construct
GFSLTRYG

SEQ ID NO: 4422 - protein, 8 aa, synthetic construct
GFSVTTYG

SEQ ID NO: 4423 - protein, 8 aa, synthetic construct
GYTFTSYW

SEQ ID NO: 4424 - protein, 8 aa, synthetic construct
GYTFTSYW

SEQ ID NO: 4425 - protein, 8 aa, synthetic construct
GYTFTTYW

SEQ ID NO: 4426 - protein, 8 aa, synthetic construct
GYTFTSYW

SEQ ID NO: 4427 - protein, 8 aa, synthetic construct
GYTFTSYW

SEQ ID NO: 4428 - protein, 8 aa, synthetic construct
GYTFTSYW

SEQ ID NO: 4429 - protein, 8 aa, synthetic construct
GYTFTSYW

SEQ ID NO: 4430 - protein, 8 aa, synthetic construct
GYTFTDYV

SEQ ID NO: 4431 - protein, 8 aa, synthetic construct
GYTFTDYV

SEQ ID NO: 4432 - protein, 8 aa, synthetic construct
GYTFTDYV

SEQ ID NO: 4433 - protein, 8 aa, synthetic construct
GYTFTDYV

SEQ ID NO: 4434 - protein, 8 aa, synthetic construct
GYTFTDYV

SEQ ID NO: 4435 - protein, 8 aa, synthetic construct
GYTFTDYV

SEQ ID NO: 4436 - protein, 8 aa, synthetic construct
GYTFTDYV

SEQ ID NO: 4437 - protein, 8 aa, synthetic construct
GYTFTDYV

SEQ ID NO: 4438 - protein, 8 aa, synthetic construct
GYTFTDYV

SEQ ID NO: 4439 - protein, 8 aa, synthetic construct
GYTFTNYW

SEQ ID NO: 4440 - protein, 8 aa, synthetic construct
GYTFTNYW

SEQ ID NO: 4441 - protein, 8 aa, synthetic construct
GYTFTNYW

SEQ ID NO: 4442 - protein, 8 aa, synthetic construct
GYTFTSYW

SEQ ID NO: 4443 - protein, 8 aa, synthetic construct
GYTFTSYW

SEQ ID NO: 4444 - protein, 8 aa, synthetic construct
GYTFTTYW

SEQ ID NO: 4445 - protein, 8 aa, synthetic construct
GYTFTSYW

SEQ ID NO: 4446 - protein, 8 aa, synthetic construct
GYTFTSYW

SEQ ID NO: 4447 - protein, 8 aa, synthetic construct
GYTFTSYW

SEQ ID NO: 4448 - protein, 8 aa, synthetic construct
GYTFTSYW

SEQ ID NO: 4449 - protein, 8 aa, synthetic construct
GYTFTDYW

SEQ ID NO: 4450 - protein, 8 aa, synthetic construct
GYTFTDYV

SEQ ID NO: 4451 - protein, 8 aa, synthetic construct
GYTFTDYV

SEQ ID NO: 4452 - protein, 8 aa, synthetic construct
GYTFTDYV

SEQ ID NO: 4453 - protein, 8 aa, synthetic construct
GYTFTDYV

SEQ ID NO: 4454 - protein, 8 aa, synthetic construct
GYTFTDYV

SEQ ID NO: 4455 - protein, 8 aa, synthetic construct
GYTFTDYV

SEQ ID NO: 4456 - protein, 8 aa, synthetic construct
GYTFTDYV

SEQ ID NO: 4457 - protein, 8 aa, synthetic construct
GYTFTDYV

SEQ ID NO: 4458 - protein, 8 aa, synthetic construct
GYTFTDYV

SEQ ID NO: 4459 - protein, 8 aa, synthetic construct
GFSLTNYG

SEQ ID NO: 4460 - protein, 8 aa, synthetic construct
GFSLTSYG

SEQ ID NO: 4461 - protein, 8 aa, synthetic construct
GFSLTSYG

SEQ ID NO: 4462 - protein, 8 aa, synthetic construct
GFSLTNYG

SEQ ID NO: 4463 - protein, 8 aa, synthetic construct
GFSLTSYG

SEQ ID NO: 4464 - protein, 8 aa, synthetic construct
GFSLTSYG

SEQ ID NO: 4465 - protein, 8 aa, synthetic construct
GYSFTSYW

SEQ ID NO: 4466 - protein, 8 aa, synthetic construct
GYSFTSYW

SEQ ID NO: 4467 - protein, 8 aa, synthetic construct
GYSFTSYW

SEQ ID NO: 4468 - protein, 8 aa, synthetic construct
GFNIKDYY

SEQ ID NO: 4469 - protein, 8 aa, synthetic construct
GFNIKDYY

SEQ ID NO: 4470 - protein, 8 aa, synthetic construct
GFNIKDYY

SEQ ID NO: 4471 - protein, 8 aa, synthetic construct
GFNIKDYY

SEQ ID NO: 4472 - protein, 8 aa, synthetic construct
GFNIKDYY

SEQ ID NO: 4473 - protein, 8 aa, synthetic construct
GFNIKDYY

SEQ ID NO: 4474 - protein, 8 aa, synthetic construct
GFNIKDTS

SEQ ID NO: 4475 - protein, 8 aa, synthetic construct
GYTFSNYY

SEQ ID NO: 4476 - protein, 8 aa, synthetic construct
GSTFTTYY

SEQ ID NO: 4477 - protein, 8 aa, synthetic construct
GFNIKDYY

SEQ ID NO: 4478 - protein, 8 aa, synthetic construct
GYTFTDYV

SEQ ID NO: 4479 - protein, 8 aa, synthetic construct
GYTFTDYV

SEQ ID NO: 4480 - protein, 8 aa, synthetic construct
GYSFTDYG

SEQ ID NO: 4481 - protein, 8 aa, synthetic construct
GYTFTSYW

SEQ ID NO: 4482 - protein, 8 aa, synthetic construct
GYTFTSYW

SEQ ID NO: 4483 - protein, 8 aa, synthetic construct
GYTFTSYW

SEQ ID NO: 4484 - protein, 8 aa, synthetic construct
GYTFTDYV

SEQ ID NO: 4485 - protein, 8 aa, synthetic construct
GFTFSSYG

SEQ ID NO: 4486 - protein, 10 aa, synthetic construct
GISLSTSGMG

SEQ ID NO: 4487 - protein, 8 aa, synthetic construct
GYTFTNYG

SEQ ID NO: 4488 - protein, 8 aa, synthetic construct
GYTFTNYG

SEQ ID NO: 4489 - protein, 8 aa, synthetic construct
GYTFTDYE

SEQ ID NO: 4490 - protein, 8 aa, synthetic construct
GYTFTDYE

SEQ ID NO: 4491 - protein, 8 aa, synthetic construct
GYTFTSYW

SEQ ID NO: 4492 - protein, 10 aa, synthetic construct
GFSLSTSGMG

SEQ ID NO: 4493 - protein, 8 aa, synthetic construct
GYTFTSSW

SEQ ID NO: 4494 - protein, 8 aa, synthetic construct
GYTFTSSW

SEQ ID NO: 4495 - protein, 8 aa, synthetic construct
GYTFTSYW

SEQ ID NO: 4496 - protein, 8 aa, synthetic construct
GYTFTDYV

SEQ ID NO: 4497 - protein, 8 aa, synthetic construct
GYTFTDYV

SEQ ID NO: 4498 - protein, 8 aa, synthetic construct
GYTFTSYW

SEQ ID NO: 4499 - protein, 8 aa, synthetic construct
GYTFTSYW

SEQ ID NO: 4500 - protein, 8 aa, synthetic construct
GYTFTSYW

SEQ ID NO: 4501 - protein, 8 aa, synthetic construct
GYTFTSYW

SEQ ID NO: 4502 - protein, 8 aa, synthetic construct
GYTFTDYV

SEQ ID NO: 4503 - protein, 8 aa, synthetic construct
GFTFSSYA

SEQ ID NO: 4504 - protein, 8 aa, synthetic construct
GYTFTDYS

SEQ ID NO: 4505 - protein, 8 aa, synthetic construct
GFTFSSYA

SEQ ID NO: 4506 - protein, 8 aa, synthetic construct
GFTFSSYA

SEQ ID NO: 4507 - protein, 8 aa, synthetic construct
GYSFTNYW

SEQ ID NO: 4508 - protein, 8 aa, synthetic construct
GYSFTNYW

SEQ ID NO: 4509 - protein, 8 aa, synthetic construct
GYTFTSSW

SEQ ID NO: 4510 - protein, 8 aa, synthetic construct
GYTFTSSW

SEQ ID NO: 4511 - protein, 8 aa, synthetic construct
GYTFTSYW

SEQ ID NO: 4512 - protein, 8 aa, synthetic construct
GYTFTSYW

SEQ ID NO: 4513 - protein, 8 aa, synthetic construct
GFSLTSYG

SEQ ID NO: 4514 - protein, 8 aa, synthetic construct
GFSLTSYG

SEQ ID NO: 4515 - protein, 8 aa, synthetic construct
GYTFTSYN

SEQ ID NO: 4516 - protein, 10 aa, synthetic construct
GFSLSTSGMG

SEQ ID NO: 4517 - protein, 8 aa, synthetic construct
GYTFTSYW

SEQ ID NO: 4518 - protein, 8 aa, synthetic construct
GFTFSSYG

SEQ ID NO: 4519 - protein, 8 aa, synthetic construct
GFTFSSYG

SEQ ID NO: 4520 - protein, 8 aa, synthetic construct
GYTFTNYW

SEQ ID NO: 4521 - protein, 8 aa, synthetic construct
GFTFSSYG

SEQ ID NO: 4522 - protein, 8 aa, synthetic construct
GFTFSSYG

SEQ ID NO: 4523 - protein, 8 aa, synthetic construct
GYTFTSYW

SEQ ID NO: 4524 - protein, 8 aa, synthetic construct
GYTFTSYW

SEQ ID NO: 4525 - protein, 8 aa, synthetic construct
GYTFTSYW

SEQ ID NO: 4526 - protein, 8 aa, synthetic construct
GYTFTSYW

SEQ ID NO: 4527 - protein, 8 aa, synthetic construct
GFNIKDYY

SEQ ID NO: 4528 - protein, 8 aa, synthetic construct
GFNIKDYY

SEQ ID NO: 4529 - protein, 8 aa, synthetic construct
GYTFTNYG

SEQ ID NO: 4530 - protein, 8 aa, synthetic construct
GYTFTNYG

SEQ ID NO: 4531 - protein, 8 aa, synthetic construct
GYTFTNYG

SEQ ID NO: 4532 - protein, 8 aa, synthetic construct
GYTFTSYW

SEQ ID NO: 4533 - protein, 8 aa, synthetic construct
GYTFTSYW

SEQ ID NO: 4534 - protein, 8 aa, synthetic construct
GFSLTSYG

SEQ ID NO: 4535 - protein, 8 aa, synthetic construct
GFSLTSYG

SEQ ID NO: 4536 - protein, 8 aa, synthetic construct
GYTFTSYW

SEQ ID NO: 4537 - protein, 8 aa, synthetic construct
GYTFTSYW

SEQ ID NO: 4538 - protein, 8 aa, synthetic construct
GYTFTDYV

SEQ ID NO: 4539 - protein, 8 aa, synthetic construct
GFTFSSYG

SEQ ID NO: 4540 - protein, 8 aa, synthetic construct
GYTFTSYW

SEQ ID NO: 4541 - protein, 8 aa, synthetic construct
GYTFTSYW

SEQ ID NO: 4542 - protein, 8 aa, synthetic construct
GYTFTSYW

SEQ ID NO: 4543 - protein, 8 aa, synthetic construct
GYTFTSYW

SEQ ID NO: 4544 - protein, 8 aa, synthetic construct
GYTFTSYW

SEQ ID NO: 4545 - protein, 8 aa, synthetic construct
GYTFTSYW

SEQ ID NO: 4546 - protein, 8 aa, synthetic construct
GYTFTNYW

SEQ ID NO: 4547 - protein, 8 aa, synthetic construct
GYTFTNYW

SEQ ID NO: 4548 - protein, 8 aa, synthetic construct
GYTFTSYW

SEQ ID NO: 4549 - protein, 8 aa, synthetic construct
GYTFTSYW

SEQ ID NO: 4550 - protein, 8 aa, synthetic construct
GYTFTSYW

SEQ ID NO: 4551 - protein, 8 aa, synthetic construct
GYTFTSYW

SEQ ID NO: 4552 - protein, 8 aa, synthetic construct
GFTFSSYG

SEQ ID NO: 4553 - protein, 8 aa, synthetic construct
GFTFSSYG

SEQ ID NO: 4554 - protein, 8 aa, synthetic construct
GFTFSSYG

SEQ ID NO: 4555 - protein, 8 aa, synthetic construct
GFNIKDTS

SEQ ID NO: 4556 - protein, 8 aa, synthetic construct
GFTFSNYY

SEQ ID NO: 4557 - protein, 8 aa, synthetic construct
GYTFTEYT

SEQ ID NO: 4558 - protein, 8 aa, synthetic construct
GFSLTSYG

SEQ ID NO: 4559 - protein, 8 aa, synthetic construct
GYTFSSYW

SEQ ID NO: 4560 - protein, 8 aa, synthetic construct
GYTFTDYE

SEQ ID NO: 4561 - protein, 8 aa, synthetic construct
GFTFSSYY

SEQ ID NO: 4562 - protein, 8 aa, synthetic construct
GFTFSSYA

SEQ ID NO: 4563 - protein, 8 aa, synthetic construct
GFNIKDTY

SEQ ID NO: 4564 - protein, 8 aa, synthetic construct
GFTFSNYY

SEQ ID NO: 4565 - protein, 8 aa, synthetic construct
GFTFNTYV

SEQ ID NO: 4566 - protein, 9 aa, synthetic construct
GYSITSGYY

SEQ ID NO: 4567 - protein, 8 aa, synthetic construct
GYTFTDYS

SEQ ID NO: 4568 - protein, 8 aa, synthetic construct
GYTFTDYS

SEQ ID NO: 4569 - protein, 8 aa, synthetic construct
GYTFTNYW

SEQ ID NO: 4570 - protein, 8 aa, synthetic construct
GYTFTDYY

SEQ ID NO: 4571 - protein, 8 aa, synthetic construct
GFTFSSYA

SEQ ID NO: 4572 - protein, 8 aa, synthetic construct
GFTFSSYA

SEQ ID NO: 4573 - protein, 8 aa, synthetic construct
GFTFSNYA

SEQ ID NO: 4574 - protein, 8 aa, synthetic construct
GFSLTSYG

SEQ ID NO: 4575 - protein, 9 aa, synthetic construct
GYSITSDHA

SEQ ID NO: 4576 - protein, 8 aa, synthetic construct
GYTFTDYE

SEQ ID NO: 4577 - protein, 9 aa, synthetic construct
GYSITSGYY

SEQ ID NO: 4578 - protein, 8 aa, synthetic construct
GFTFSNYY

SEQ ID NO: 4579 - protein, 8 aa, synthetic construct
GFNIKDYF

SEQ ID NO: 4580 - protein, 8 aa, synthetic construct
GFNIKDYF

SEQ ID NO: 4581 - protein, 8 aa, synthetic construct
GFTFSSYA

SEQ ID NO: 4582 - protein, 8 aa, synthetic construct
GFTFSSYA

SEQ ID NO: 4583 - protein, 8 aa, synthetic construct
GFTFSSYA

SEQ ID NO: 4584 - protein, 9 aa, synthetic construct
GYSITSGYY

SEQ ID NO: 4585 - protein, 8 aa, synthetic construct
GFSFNTYA

SEQ ID NO: 4586 - protein, 8 aa, synthetic construct
GFTFSSYG

SEQ ID NO: 4587 - protein, 8 aa, synthetic construct
GYTFTDYE

SEQ ID NO: 4588 - protein, 8 aa, synthetic construct
GFTFSSYA

SEQ ID NO: 4589 - protein, 8 aa, synthetic construct
GFTFSSYA

SEQ ID NO: 4590 - protein, 8 aa, synthetic construct
GFSLTSYG

SEQ ID NO: 4591 - protein, 8 aa, synthetic construct
GYTFTNYW

SEQ ID NO: 4592 - protein, 8 aa, synthetic construct
GYTFTDYY

SEQ ID NO: 4593 - protein, 8 aa, synthetic construct
GYTFTGYW

SEQ ID NO: 4594 - protein, 8 aa, synthetic construct
GYTFTGYW

SEQ ID NO: 4595 - protein, 8 aa, synthetic construct
GFSLTSYG

SEQ ID NO: 4596 - protein, 8 aa, synthetic construct
GFSLTSYG

SEQ ID NO: 4597 - protein, 8 aa, synthetic construct
GYTFTSYW

SEQ ID NO: 4598 - protein, 8 aa, synthetic construct
GYTFTSYW

SEQ ID NO: 4599 - protein, 9 aa, synthetic construct
GYSITSGYY

SEQ ID NO: 4600 - protein, 8 aa, synthetic construct
GFSLTSYG

SEQ ID NO: 4601 - protein, 8 aa, synthetic construct
GYTFTSYW

SEQ ID NO: 4602 - protein, 8 aa, synthetic construct
GYSFTDYN

SEQ ID NO: 4603 - protein, 8 aa, synthetic construct
GYTFTSYW

SEQ ID NO: 4604 - protein, 8 aa, synthetic construct
GYSFTDYN

SEQ ID NO: 4605 - protein, 8 aa, synthetic construct
GFSLTSYG

SEQ ID NO: 4606 - protein, 8 aa, synthetic construct
GFSLTSYG

SEQ ID NO: 4607 - protein, 8 aa, synthetic construct
GYTFTSYW

SEQ ID NO: 4608 - protein, 8 aa, synthetic construct
GFNIKNTY

SEQ ID NO: 4609 - protein, 8 aa, synthetic construct
GYTFTSYW

SEQ ID NO: 4610 - protein, 8 aa, synthetic construct
GYTFTDYY

SEQ ID NO: 4611 - protein, 8 aa, synthetic construct
GYTFTSYG

SEQ ID NO: 4612 - protein, 8 aa, synthetic construct
GFSLTSYG

SEQ ID NO: 4613 - protein, 8 aa, synthetic construct
GYSFTDYN

SEQ ID NO: 4614 - protein, 8 aa, synthetic construct
GYTFTDYE

SEQ ID NO: 4615 - protein, 8 aa, synthetic construct
GYTFTSYW

SEQ ID NO: 4616 - protein, 8 aa, synthetic construct
GFTFSGYW

SEQ ID NO: 4617-4874 - skipped (258 entries)

SEQ ID NO: 4875 - protein, 8 aa, synthetic construct
ILPGSGST

SEQ ID NO: 4876 - protein, 8 aa, synthetic construct
ILPGSGST

SEQ ID NO: 4877 - protein, 8 aa, synthetic construct
ILPGSDST

SEQ ID NO: 4878 - protein, 8 aa, synthetic construct
ILPGSGST

SEQ ID NO: 4879 - protein, 8 aa, synthetic construct
IFPGSGHT

SEQ ID NO: 4880 - protein, 8 aa, synthetic construct
ILPGSGST

SEQ ID NO: 4881 - protein, 8 aa, synthetic construct
ILPGSGST

SEQ ID NO: 4882 - protein, 8 aa, synthetic construct
ILPGSGST

SEQ ID NO: 4883 - protein, 8 aa, synthetic construct
ILPGSGST

SEQ ID NO: 4884 - protein, 8 aa, synthetic construct
ILPGSGYT

SEQ ID NO: 4885 - protein, 8 aa, synthetic construct
ILPGSGST

SEQ ID NO: 4886 - protein, 8 aa, synthetic construct
ILPGSGST

SEQ ID NO: 4887 - protein, 8 aa, synthetic construct
VLPGSGST

SEQ ID NO: 4888 - protein, 8 aa, synthetic construct
ISPGSGST

SEQ ID NO: 4889 - protein, 8 aa, synthetic construct
ILPGSGTP

SEQ ID NO: 4890 - protein, 8 aa, synthetic construct
ILPGSGST

SEQ ID NO: 4891 - protein, 8 aa, synthetic construct
ILPGSGRT

SEQ ID NO: 4892 - protein, 8 aa, synthetic construct
ILPGSGRT

SEQ ID NO: 4893 - protein, 8 aa, synthetic construct
ILPGSGST

SEQ ID NO: 4894 - protein, 8 aa, synthetic construct
VLPGSGST

SEQ ID NO: 4895 - protein, 8 aa, synthetic construct
ILPGSGRT

SEQ ID NO: 4896 - protein, 8 aa, synthetic construct
VLPGSGST

SEQ ID NO: 4897 - protein, 8 aa, synthetic construct
ILPGSGRT

SEQ ID NO: 4898 - protein, 8 aa, synthetic construct
ILPGSGST

SEQ ID NO: 4899 - protein, 8 aa, synthetic construct
ILPGSDST

SEQ ID NO: 4900 - protein, 8 aa, synthetic construct
ILPGSGST

SEQ ID NO: 4901 - protein, 8 aa, synthetic construct
IFPGSGHT

SEQ ID NO: 4902 - protein, 8 aa, synthetic construct
ILPGSGST

SEQ ID NO: 4903 - protein, 8 aa, synthetic construct
ILPGSGST

SEQ ID NO: 4904 - protein, 8 aa, synthetic construct
ILPGSGYT

SEQ ID NO: 4905 - protein, 8 aa, synthetic construct
ILPGSGST

SEQ ID NO: 4906 - protein, 8 aa, synthetic construct
ISPGSGST

SEQ ID NO: 4907 - protein, 8 aa, synthetic construct
ILPGSGTP

SEQ ID NO: 4908 - protein, 8 aa, synthetic construct
ILPGSGST

SEQ ID NO: 4909 - protein, 8 aa, synthetic construct
ILPGSGRT

SEQ ID NO: 4910 - protein, 8 aa, synthetic construct
ILPGSGST

SEQ ID NO: 4911 - protein, 8 aa, synthetic construct
ILPGSGST

SEQ ID NO: 4912 - protein, 8 aa, synthetic construct
ISSYNGAT

SEQ ID NO: 4913 - protein, 8 aa, synthetic construct
ISSYNGVT

SEQ ID NO: 4914 - protein, 8 aa, synthetic construct
ISSYNGVT

SEQ ID NO: 4915 - protein, 8 aa, synthetic construct
ISSYNGVT

SEQ ID NO: 4916 - protein, 8 aa, synthetic construct
ISSYNGAN

SEQ ID NO: 4917 - protein, 8 aa, synthetic construct
ISSYNGVT

SEQ ID NO: 4918 - protein, 8 aa, synthetic construct
ISSYNGVT

SEQ ID NO: 4919 - protein, 8 aa, synthetic construct
ISSYNGVT

SEQ ID NO: 4920 - protein, 8 aa, synthetic construct
ISSYNGVT

SEQ ID NO: 4921 - protein, 8 aa, synthetic construct
ISSYNGAT

SEQ ID NO: 4922 - protein, 8 aa, synthetic construct
ISSYNGAT

SEQ ID NO: 4923 - protein, 8 aa, synthetic construct
ISSYNGVT

SEQ ID NO: 4924 - protein, 8 aa, synthetic construct
ISSYNGAT

SEQ ID NO: 4925 - protein, 7 aa, synthetic construct
IWRGGST

SEQ ID NO: 4926 - protein, 7 aa, synthetic construct
IWRGGST

SEQ ID NO: 4927 - protein, 7 aa, synthetic construct
IWRGGST

SEQ ID NO: 4928 - protein, 7 aa, synthetic construct
IWRGGST

SEQ ID NO: 4929 - protein, 7 aa, synthetic construct
IWRGGST

SEQ ID NO: 4930 - protein, 7 aa, synthetic construct
IWRGGST

SEQ ID NO: 4931 - protein, 7 aa, synthetic construct
IWRGGST

SEQ ID NO: 4932 - protein, 7 aa, synthetic construct
IWRGGST

SEQ ID NO: 4933 - protein, 7 aa, synthetic construct
IWRGGST

SEQ ID NO: 4934 - protein, 7 aa, synthetic construct
IWRGGST

SEQ ID NO: 4935 - protein, 7 aa, synthetic construct
IWRGGST

SEQ ID NO: 4936 - protein, 7 aa, synthetic construct
IWRGGST

SEQ ID NO: 4937 - protein, 8 aa, synthetic construct
IHPNSGST

SEQ ID NO: 4938 - protein, 8 aa, synthetic construct
IHPNSGST

SEQ ID NO: 4939 - protein, 8 aa, synthetic construct
IHPNSDNT

SEQ ID NO: 4940 - protein, 8 aa, synthetic construct
IHPNSGTT

SEQ ID NO: 4941 - protein, 8 aa, synthetic construct
IHPNSGNT

SEQ ID NO: 4942 - protein, 8 aa, synthetic construct
IHPNSGST

SEQ ID NO: 4943 - protein, 8 aa, synthetic construct
IHPNSGTT

SEQ ID NO: 4944 - protein, 8 aa, synthetic construct
IYPGSGST

SEQ ID NO: 4945 - protein, 8 aa, synthetic construct
IYPGSGSS

SEQ ID NO: 4946 - protein, 8 aa, synthetic construct
IYPGSGSS

SEQ ID NO: 4947 - protein, 8 aa, synthetic construct
IYPGSGSS

SEQ ID NO: 4948 - protein, 8 aa, synthetic construct
IYPGSGSS

SEQ ID NO: 4949 - protein, 8 aa, synthetic construct
IYPGSGST

SEQ ID NO: 4950 - protein, 8 aa, synthetic construct
IYPGSGSS

SEQ ID NO: 4951 - protein, 8 aa, synthetic construct
IYPGSGSS

SEQ ID NO: 4952 - protein, 8 aa, synthetic construct
IYPGSGSS

SEQ ID NO: 4953 - protein, 8 aa, synthetic construct
IDPSDSET

SEQ ID NO: 4954 - protein, 8 aa, synthetic construct
IDPSDSET

SEQ ID NO: 4955 - protein, 8 aa, synthetic construct
IDPSDSET

SEQ ID NO: 4956 - protein, 8 aa, synthetic construct
IHPNSGST

SEQ ID NO: 4957 - protein, 8 aa, synthetic construct
IHPNSDST

SEQ ID NO: 4958 - protein, 8 aa, synthetic construct
IHPNSGST

SEQ ID NO: 4959 - protein, 8 aa, synthetic construct
IHPNSGSP

SEQ ID NO: 4960 - protein, 8 aa, synthetic construct
IHPNSGSP

SEQ ID NO: 4961 - protein, 8 aa, synthetic construct
IYPSDSYT

SEQ ID NO: 4962 - protein, 8 aa, synthetic construct
IYPSDSYT

SEQ ID NO: 4963 - protein, 8 aa, synthetic construct
IYPSDSYT

SEQ ID NO: 4964 - protein, 8 aa, synthetic construct
IYPGSGSS

SEQ ID NO: 4965 - protein, 8 aa, synthetic construct
IYPGSGSN

SEQ ID NO: 4966 - protein, 8 aa, synthetic construct
IYPGSGSS

SEQ ID NO: 4967 - protein, 8 aa, synthetic construct
IYPGSGSS

SEQ ID NO: 4968 - protein, 8 aa, synthetic construct
IYPGSGSS

SEQ ID NO: 4969 - protein, 8 aa, synthetic construct
IYPGSGSN

SEQ ID NO: 4970 - protein, 8 aa, synthetic construct
IYPGSGSS

SEQ ID NO: 4971 - protein, 8 aa, synthetic construct
IYPGSGSS

SEQ ID NO: 4972 - protein, 8 aa, synthetic construct
IYPGSGSS

SEQ ID NO: 4973 - protein, 7 aa, synthetic construct
VWAGGIT

SEQ ID NO: 4974 - protein, 7 aa, synthetic construct
LWAGGIT

SEQ ID NO: 4975 - protein, 7 aa, synthetic construct
IWAGGTT

SEQ ID NO: 4976 - protein, 7 aa, synthetic construct
VWAGGIT

SEQ ID NO: 4977 - protein, 7 aa, synthetic construct
LWAGGIT

SEQ ID NO: 4978 - protein, 7 aa, synthetic construct
IWAGGTT

SEQ ID NO: 4979 - protein, 8 aa, synthetic construct
IDPSDSET

SEQ ID NO: 4980 - protein, 8 aa, synthetic construct
IDPSDSET

SEQ ID NO: 4981 - protein, 8 aa, synthetic construct
IDPSDSET

SEQ ID NO: 4982 - protein, 8 aa, synthetic construct
IDPENGDT

SEQ ID NO: 4983 - protein, 8 aa, synthetic construct
IDPENGDT

SEQ ID NO: 4984 - protein, 8 aa, synthetic construct
IDPENGDT

SEQ ID NO: 4985 - protein, 8 aa, synthetic construct
IDPENGDT

SEQ ID NO: 4986 - protein, 8 aa, synthetic construct
IDPENGDT

SEQ ID NO: 4987 - protein, 8 aa, synthetic construct
IDPENGDT

SEQ ID NO: 4988 - protein, 8 aa, synthetic construct
IDPANGNT

SEQ ID NO: 4989 - protein, 8 aa, synthetic construct
INPSNGDT

SEQ ID NO: 4990 - protein, 8 aa, synthetic construct
INPSNGGT

SEQ ID NO: 4991 - protein, 8 aa, synthetic construct
IDPEDGDT

SEQ ID NO: 4992 - protein, 8 aa, synthetic construct
IYPGSGST

SEQ ID NO: 4993 - protein, 8 aa, synthetic construct
IYPGSGST

SEQ ID NO: 4994 - protein, 8 aa, synthetic construct
ISTYYGDA

SEQ ID NO: 4995 - protein, 8 aa, synthetic construct
IDPSDSYT

SEQ ID NO: 4996 - protein, 8 aa, synthetic construct
IDPSDSYT

SEQ ID NO: 4997 - protein, 8 aa, synthetic construct
IHPSDSDT

SEQ ID NO: 4998 - protein, 8 aa, synthetic construct
IYPGSGST

SEQ ID NO: 4999 - protein, 8 aa, synthetic construct
ISSGGSYT

SEQ ID NO: 5000 - protein, 6 aa, synthetic construct
IWNNDN

SEQ ID NO: 5001 - protein, 8 aa, synthetic construct
INTYTGEP

SEQ ID NO: 5002 - protein, 8 aa, synthetic construct
INTYTGEP

SEQ ID NO: 5003 - protein, 8 aa, synthetic construct
IDPETGGT

SEQ ID NO: 5004 - protein, 8 aa, synthetic construct
IDPETGGT

SEQ ID NO: 5005 - protein, 8 aa, synthetic construct
IDPSDSYT

SEQ ID NO: 5006 - protein, 7 aa, synthetic construct
IYWDDDK

SEQ ID NO: 5007 - protein, 8 aa, synthetic construct
IHPNSGNT

SEQ ID NO: 5008 - protein, 8 aa, synthetic construct
IHPNSGNT

SEQ ID NO: 5009 - protein, 8 aa, synthetic construct
IHPNSGST

SEQ ID NO: 5010 - protein, 8 aa, synthetic construct
IYPGSGSN

SEQ ID NO: 5011 - protein, 8 aa, synthetic construct
IYPGSGSN

SEQ ID NO: 5012 - protein, 8 aa, synthetic construct
IHPNSGST

SEQ ID NO: 5013 - protein, 8 aa, synthetic construct
IYPGNSDT

SEQ ID NO: 5014 - protein, 8 aa, synthetic construct
IYPGNSDT

SEQ ID NO: 5015 - protein, 8 aa, synthetic construct
IHPNSGST

SEQ ID NO: 5016 - protein, 8 aa, synthetic construct
IYPGSGST

SEQ ID NO: 5017 - protein, 8 aa, synthetic construct
ISDGGSYT

SEQ ID NO: 5018 - protein, 8 aa, synthetic construct
INTETGEP

SEQ ID NO: 5019 - protein, 8 aa, synthetic construct
ISSGGSYT

SEQ ID NO: 5020 - protein, 8 aa, synthetic construct
ISSGGSYT

SEQ ID NO: 5021 - protein, 8 aa, synthetic construct
IDPSDSET

SEQ ID NO: 5022 - protein, 8 aa, synthetic construct
IDPSDSET

SEQ ID NO: 5023 - protein, 8 aa, synthetic construct
IHPNSGNT

SEQ ID NO: 5024 - protein, 8 aa, synthetic construct
IHPNSGNT

SEQ ID NO: 5025 - protein, 8 aa, synthetic construct
IHPNSGST

SEQ ID NO: 5026 - protein, 8 aa, synthetic construct
IHPNSGST

SEQ ID NO: 5027 - protein, 7 aa, synthetic construct
IWSGGST

SEQ ID NO: 5028 - protein, 7 aa, synthetic construct
IWSGGST

SEQ ID NO: 5029 - protein, 8 aa, synthetic construct
LYSGNGDT

SEQ ID NO: 5030 - protein, 7 aa, synthetic construct
IYWDDDK

SEQ ID NO: 5031 - protein, 8 aa, synthetic construct
IHPNSGST

SEQ ID NO: 5032 - protein, 8 aa, synthetic construct
ISSGGSYT

SEQ ID NO: 5033 - protein, 8 aa, synthetic construct
ISSGGSYT

SEQ ID NO: 5034 - protein, 8 aa, synthetic construct
IHPNSGTT

SEQ ID NO: 5035 - protein, 8 aa, synthetic construct
ISSGGSYT

SEQ ID NO: 5036 - protein, 8 aa, synthetic construct
ISSGGSYT

SEQ ID NO: 5037 - protein, 8 aa, synthetic construct
IHPNSGST

SEQ ID NO: 5038 - protein, 8 aa, synthetic construct
IHPNSGST

SEQ ID NO: 5039 - protein, 8 aa, synthetic construct
IDPSDSET

SEQ ID NO: 5040 - protein, 8 aa, synthetic construct
IDPSDSET

SEQ ID NO: 5041 - protein, 8 aa, synthetic construct
IDPEDGET

SEQ ID NO: 5042 - protein, 8 aa, synthetic construct
IDPEDGET

SEQ ID NO: 5043 - protein, 8 aa, synthetic construct
INTNTGEP

SEQ ID NO: 5044 - protein, 8 aa, synthetic construct
INTNTGEP

SEQ ID NO: 5045 - protein, 8 aa, synthetic construct
INTNTGEP

SEQ ID NO: 5046 - protein, 8 aa, synthetic construct
INPSSGYT

SEQ ID NO: 5047 - protein, 8 aa, synthetic construct
INPSSGYT

SEQ ID NO: 5048 - protein, 7 aa, synthetic construct
IWAGGST

SEQ ID NO: 5049 - protein, 7 aa, synthetic construct
IWAGGST

SEQ ID NO: 5050 - protein, 8 aa, synthetic construct
IDPSDSET

SEQ ID NO: 5051 - protein, 8 aa, synthetic construct
IDPSDSET

SEQ ID NO: 5052 - protein, 8 aa, synthetic construct
IYPGSGSA

SEQ ID NO: 5053 - protein, 8 aa, synthetic construct
ISSGGSYT

SEQ ID NO: 5054 - protein, 8 aa, synthetic construct
IHPNSGST

SEQ ID NO: 5055 - protein, 8 aa, synthetic construct
IHPNSGST

SEQ ID NO: 5056 - protein, 8 aa, synthetic construct
IHPNSGST

SEQ ID NO: 5057 - protein, 8 aa, synthetic construct
IHPNSGST

SEQ ID NO: 5058 - protein, 8 aa, synthetic construct
IHPNSGST

SEQ ID NO: 5059 - protein, 8 aa, synthetic construct
IHPNSGST

SEQ ID NO: 5060 - protein, 8 aa, synthetic construct
IDPSDSET

SEQ ID NO: 5061 - protein, 8 aa, synthetic construct
IDPSDSET

SEQ ID NO: 5062 - protein, 8 aa, synthetic construct
IHPNSGST

SEQ ID NO: 5063 - protein, 8 aa, synthetic construct
IHPNSGST

SEQ ID NO: 5064 - protein, 8 aa, synthetic construct
IHPNSGST

SEQ ID NO: 5065 - protein, 8 aa, synthetic construct
IHPNSGST

SEQ ID NO: 5066 - protein, 8 aa, synthetic construct
ISSGGSYT

SEQ ID NO: 5067 - protein, 8 aa, synthetic construct
ISSGGSYT

SEQ ID NO: 5068 - protein, 8 aa, synthetic construct
ISSGGSYT

SEQ ID NO: 5069 - protein, 8 aa, synthetic construct
IDPANGNT

SEQ ID NO: 5070 - protein, 8 aa, synthetic construct
INSNGGST

SEQ ID NO: 5071 - protein, 8 aa, synthetic construct
IYPNNGGT

SEQ ID NO: 5072 - protein, 7 aa, synthetic construct
IWSGGST

SEQ ID NO: 5073 - protein, 8 aa, synthetic construct
ILPGSGST

SEQ ID NO: 5074 - protein, 8 aa, synthetic construct
IDPETGGT

SEQ ID NO: 5075 - protein, 8 aa, synthetic construct
INSNGGST

SEQ ID NO: 5076 - protein, 7 aa, synthetic construct
ISSGGST

SEQ ID NO: 5077 - protein, 8 aa, synthetic construct
IDPANGNT

SEQ ID NO: 5078 - protein, 8 aa, synthetic construct
INSNGGST

SEQ ID NO: 5079 - protein, 10 aa, synthetic construct
IRSKSDNYAT

SEQ ID NO: 5080 - protein, 7 aa, synthetic construct
ISYDGSN

SEQ ID NO: 5081 - protein, 8 aa, synthetic construct
INTETGEP

SEQ ID NO: 5082 - protein, 8 aa, synthetic construct
INTETGEP

SEQ ID NO: 5083 - protein, 8 aa, synthetic construct
IDPYDSET

SEQ ID NO: 5084 - protein, 8 aa, synthetic construct
VNPYNGGT

SEQ ID NO: 5085 - protein, 7 aa, synthetic construct
ISSGGST

SEQ ID NO: 5086 - protein, 8 aa, synthetic construct
ISSGGSYT

SEQ ID NO: 5087 - protein, 7 aa, synthetic construct
ISSGGTT

SEQ ID NO: 5088 - protein, 7 aa, synthetic construct
IWAGGST

SEQ ID NO: 5089 - protein, 7 aa, synthetic construct
ISYSGST

SEQ ID NO: 5090 - protein, 8 aa, synthetic construct
IDPETGGT

SEQ ID NO: 5091 - protein, 7 aa, synthetic construct
ISYDGSN

SEQ ID NO: 5092 - protein, 8 aa, synthetic construct
INSNGGST

SEQ ID NO: 5093 - protein, 8 aa, synthetic construct
IDPETDNT

SEQ ID NO: 5094 - protein, 8 aa, synthetic construct
IDPETDNT

SEQ ID NO: 5095 - protein, 8 aa, synthetic construct
ISSGGSYT

SEQ ID NO: 5096 - protein, 8 aa, synthetic construct
ISSGGSYT

SEQ ID NO: 5097 - protein, 8 aa, synthetic construct
ISNGGSYT

SEQ ID NO: 5098 - protein, 7 aa, synthetic construct
MSYDGSN

SEQ ID NO: 5099 - protein, 10 aa, synthetic construct
IRSKSNNYAT

SEQ ID NO: 5100 - protein, 8 aa, synthetic construct
ISSGGSYT

SEQ ID NO: 5101 - protein, 8 aa, synthetic construct
IDPETGGT

SEQ ID NO: 5102 - protein, 8 aa, synthetic construct
ISSGGSYT

SEQ ID NO: 5103 - protein, 8 aa, synthetic construct
ISSGGSYT

SEQ ID NO: 5104 - protein, 7 aa, synthetic construct
IWSGGST

SEQ ID NO: 5105 - protein, 8 aa, synthetic construct
IHPNSGST

SEQ ID NO: 5106 - protein, 8 aa, synthetic construct
INPNNGGT

SEQ ID NO: 5107 - protein, 8 aa, synthetic construct
ILPGSGST

SEQ ID NO: 5108 - protein, 8 aa, synthetic construct
ILPGSGST

SEQ ID NO: 5109 - protein, 7 aa, synthetic construct
IWSGGST

SEQ ID NO: 5110 - protein, 7 aa, synthetic construct
IWSGGST

SEQ ID NO: 5111 - protein, 8 aa, synthetic construct
IDPSDSYT

SEQ ID NO: 5112 - protein, 8 aa, synthetic construct
IDPSDSYT

SEQ ID NO: 5113 - protein, 7 aa, synthetic construct
ISYDGSN

SEQ ID NO: 5114 - protein, 7 aa, synthetic construct
IWSGGST

SEQ ID NO: 5115 - protein, 8 aa, synthetic construct
IYPGSGST

SEQ ID NO: 5116 - protein, 8 aa, synthetic construct
INPNYGTT

SEQ ID NO: 5117 - protein, 8 aa, synthetic construct
IDPSDSYT

SEQ ID NO: 5118 - protein, 8 aa, synthetic construct
INPNYGTT

SEQ ID NO: 5119 - protein, 7 aa, synthetic construct
IWRGGST

SEQ ID NO: 5120 - protein, 7 aa, synthetic construct
IWSGGST

SEQ ID NO: 5121 - protein, 8 aa, synthetic construct
IDPSDSYT

SEQ ID NO: 5122 - protein, 8 aa, synthetic construct
IDPANGNT

SEQ ID NO: 5123 - protein, 8 aa, synthetic construct
IDPSDSET

SEQ ID NO: 5124 - protein, 8 aa, synthetic construct
INPNNGGT

SEQ ID NO: 5125 - protein, 8 aa, synthetic construct
IYPRSGNT

SEQ ID NO: 5126 - protein, 7 aa, synthetic construct
IWSGGST

SEQ ID NO: 5127 - protein, 8 aa, synthetic construct
INPNYGTT

SEQ ID NO: 5128 - protein, 8 aa, synthetic construct
IDPETGGT

SEQ ID NO: 5129 - protein, 8 aa, synthetic construct
IDPSDSYT

SEQ ID NO: 5130 - protein, 8 aa, synthetic construct
ISPGGGST

SEQ ID NO: 5131-5643 - skipped (513 entries)

SEQ ID NO: 5644 - protein, 11 aa, synthetic construct
KASQDINSYLS

SEQ ID NO: 5645 - protein, 11 aa, synthetic construct
KASQDINSYLN

SEQ ID NO: 5646 - protein, 11 aa, synthetic construct
KASQDINSYLS

SEQ ID NO: 5647 - protein, 11 aa, synthetic construct
KASQDINSYLS

SEQ ID NO: 5648 - protein, 11 aa, synthetic construct
KASQDINSYLS

SEQ ID NO: 5649 - protein, 11 aa, synthetic construct
KASQDINSYLS

SEQ ID NO: 5650 - protein, 11 aa, synthetic construct
KASQDINSYLS

SEQ ID NO: 5651 - protein, 11 aa, synthetic construct
KASQDINSYLS

SEQ ID NO: 5652 - protein, 11 aa, synthetic construct
KASQDINSYLS

SEQ ID NO: 5653 - protein, 11 aa, synthetic construct
KASQDINSYLS

SEQ ID NO: 5654 - protein, 11 aa, synthetic construct
KASQDINSYLS

SEQ ID NO: 5655 - protein, 11 aa, synthetic construct
KASQDINSYLS

SEQ ID NO: 5656 - protein, 11 aa, synthetic construct
KASQDINGYLS

SEQ ID NO: 5657 - protein, 11 aa, synthetic construct
KASQDINSYLS

SEQ ID NO: 5658 - protein, 11 aa, synthetic construct
KASQDINSYLS

SEQ ID NO: 5659 - protein, 11 aa, synthetic construct
KASQDINSYLN

SEQ ID NO: 5660 - protein, 11 aa, synthetic construct
KASQDINSYLS

SEQ ID NO: 5661 - protein, 11 aa, synthetic construct
KASQDINSYLS

SEQ ID NO: 5662 - protein, 10 aa, synthetic construct
ASQDINSYLS

SEQ ID NO: 5663 - protein, 10 aa, synthetic construct
ASQDINGYLS

SEQ ID NO: 5664 - protein, 10 aa, synthetic construct
ASQDINSYLS

SEQ ID NO: 5665 - protein, 10 aa, synthetic construct
ASQDINGYLS

SEQ ID NO: 5666 - protein, 10 aa, synthetic construct
ASQDINSYLS

SEQ ID NO: 5667 - protein, 10 aa, synthetic construct
ASQDINSYLS

SEQ ID NO: 5668 - protein, 10 aa, synthetic construct
ASQDINSYLS

SEQ ID NO: 5669 - protein, 10 aa, synthetic construct
ASQDINSYLS

SEQ ID NO: 5670 - protein, 10 aa, synthetic construct
ASQDINSYLS

SEQ ID NO: 5671 - protein, 10 aa, synthetic construct
ASQDINSYLS

SEQ ID NO: 5672 - protein, 10 aa, synthetic construct
ASQDINSYLS

SEQ ID NO: 5673 - protein, 10 aa, synthetic construct
ASQDINSYLS

SEQ ID NO: 5674 - protein, 10 aa, synthetic construct
ASQDINSYLS

SEQ ID NO: 5675 - protein, 10 aa, synthetic construct
ASQDINSYLS

SEQ ID NO: 5676 - protein, 10 aa, synthetic construct
ASQDINSYLS

SEQ ID NO: 5677 - protein, 10 aa, synthetic construct
ASQDINSYLN

SEQ ID NO: 5678 - protein, 10 aa, synthetic construct
ASQDINSYLS

SEQ ID NO: 5679 - protein, 10 aa, synthetic construct
ASQDINSYLS

SEQ ID NO: 5680 - protein, 10 aa, synthetic construct
ASQDINSYLS

SEQ ID NO: 5681 - protein, 11 aa, synthetic construct
RASENIYSNLA

SEQ ID NO: 5682 - protein, 11 aa, synthetic construct
RASENIYSNLA

SEQ ID NO: 5683 - protein, 11 aa, synthetic construct
RASENIYSNLA

SEQ ID NO: 5684 - protein, 11 aa, synthetic construct
RASENIYSNLA

SEQ ID NO: 5685 - protein, 11 aa, synthetic construct
RASENIYSNLA

SEQ ID NO: 5686 - protein, 11 aa, synthetic construct
RASENIYSNLA

SEQ ID NO: 5687 - protein, 11 aa, synthetic construct
RASDNIYSNLA

SEQ ID NO: 5688 - protein, 11 aa, synthetic construct
RASENIYSNLA

SEQ ID NO: 5689 - protein, 11 aa, synthetic construct
RASENIYSNLA

SEQ ID NO: 5690 - protein, 11 aa, synthetic construct
RASENIYSNLA

SEQ ID NO: 5691 - protein, 11 aa, synthetic construct
RASENIYSNLA

SEQ ID NO: 5692 - protein, 10 aa, synthetic construct
ASDNIYSNLA

SEQ ID NO: 5693 - protein, 10 aa, synthetic construct
ASENIYSNLA

SEQ ID NO: 5694 - protein, 11 aa, synthetic construct
KASQDINSYLS

SEQ ID NO: 5695 - protein, 11 aa, synthetic construct
KASENVVTYVS

SEQ ID NO: 5696 - protein, 11 aa, synthetic construct
KASENVVTYVS

SEQ ID NO: 5697 - protein, 11 aa, synthetic construct
KASENVVTYVS

SEQ ID NO: 5698 - protein, 11 aa, synthetic construct
KASENVVTYVS

SEQ ID NO: 5699 - protein, 11 aa, synthetic construct
KASENVVTYVS

SEQ ID NO: 5700 - protein, 11 aa, synthetic construct
KASENVVTYVS

SEQ ID NO: 5701 - protein, 10 aa, synthetic construct
ASQDINSYLS

SEQ ID NO: 5702 - protein, 10 aa, synthetic construct
ASENVVTYVS

SEQ ID NO: 5703 - protein, 10 aa, synthetic construct
ASENVVTYVS

SEQ ID NO: 5704 - protein, 10 aa, synthetic construct
ASENVVTYVS

SEQ ID NO: 5705 - protein, 10 aa, synthetic construct
ASENVVTYVS

SEQ ID NO: 5706 - protein, 10 aa, synthetic construct
SASSSVSYMH

SEQ ID NO: 5707 - protein, 10 aa, synthetic construct
SASSSVSYMH

SEQ ID NO: 5708 - protein, 10 aa, synthetic construct
SASSSVSYMH

SEQ ID NO: 5709 - protein, 10 aa, synthetic construct
SASSSVSYMH

SEQ ID NO: 5710 - protein, 10 aa, synthetic construct
SASSSVSYMH

SEQ ID NO: 5711 - protein, 9 aa, synthetic construct
ASSSVSYMH

SEQ ID NO: 5712 - protein, 9 aa, synthetic construct
ASSSVSYMH

SEQ ID NO: 5713 - protein, 15 aa, synthetic construct
KASQSVDYDGDSYMN

SEQ ID NO: 5714 - protein, 15 aa, synthetic construct
KASQSVDYDGDSYMN

SEQ ID NO: 5715 - protein, 15 aa, synthetic construct
KASQSVDYDGDSYMN

SEQ ID NO: 5716 - protein, 15 aa, synthetic construct
KASQSVDYDGDSYMN

SEQ ID NO: 5717 - protein, 15 aa, synthetic construct
KASQSVDYDGDSYMN

SEQ ID NO: 5718 - protein, 14 aa, synthetic construct
ASQSVDYDGDSYMN

SEQ ID NO: 5719 - protein, 14 aa, synthetic construct
ASQSVDYDGDSYMN

SEQ ID NO: 5720 - protein, 14 aa, synthetic construct
ASQSVDYDGDSYMN

SEQ ID NO: 5721 - protein, 14 aa, synthetic construct
ASQSVDYDGDSYMN

SEQ ID NO: 5722 - protein, 11 aa, synthetic construct
KASQDINKYIA

SEQ ID NO: 5723 - protein, 11 aa, synthetic construct
KASQDINKYIA

SEQ ID NO: 5724 - protein, 11 aa, synthetic construct
KASQDINKYIA

SEQ ID NO: 5725 - protein, 11 aa, synthetic construct
QATQDIVKNLN

SEQ ID NO: 5726 - protein, 11 aa, synthetic construct
QATQDIVKNLN

SEQ ID NO: 5727 - protein, 11 aa, synthetic construct
QATQDIVKNLN

SEQ ID NO: 5728 - protein, 11 aa, synthetic construct
QATQDIVKNLN

SEQ ID NO: 5729 - protein, 10 aa, synthetic construct
ATQDIVKNLN

SEQ ID NO: 5730 - protein, 10 aa, synthetic construct
RASSSVNYMY

SEQ ID NO: 5731 - protein, 10 aa, synthetic construct
RASSSVNYMY

SEQ ID NO: 5732 - protein, 10 aa, synthetic construct
RASSSVNYMY

SEQ ID NO: 5733 - protein, 15 aa, synthetic construct
KASQSVDYDGDSYMN

SEQ ID NO: 5734 - protein, 15 aa, synthetic construct
KASQSVDYDGDSYMN

SEQ ID NO: 5735 - protein, 15 aa, synthetic construct
KASQSVDYDGDSYMN

SEQ ID NO: 5736 - protein, 14 aa, synthetic construct
ASQSVDYDGDSYMN

SEQ ID NO: 5737 - protein, 14 aa, synthetic construct
ASQSVDYDGDSYMN

SEQ ID NO: 5738 - protein, 14 aa, synthetic construct
ASQSVDYDGDSYMN

SEQ ID NO: 5739 - protein, 14 aa, synthetic construct
ASQSVDYDGDSYMN

SEQ ID NO: 5740 - protein, 14 aa, synthetic construct
ASQSVDYDGDSYMN

SEQ ID NO: 5741 - protein, 14 aa, synthetic construct
ASQSVDYDGDSYMN

SEQ ID NO: 5742 - protein, 15 aa, synthetic construct
RASQSVSTSSYSYMH

SEQ ID NO: 5743 - protein, 15 aa, synthetic construct
RASQSVSTSSYSYMH

SEQ ID NO: 5744 - protein, 15 aa, synthetic construct
RASQSVSTSSYSYMH

SEQ ID NO: 5745 - protein, 14 aa, synthetic construct
ASQSVSTSSYSYMH

SEQ ID NO: 5746 - protein, 14 aa, synthetic construct
ASQSVSTSSYSYMH

SEQ ID NO: 5747 - protein, 14 aa, synthetic construct
ASQSVSTSSYSYMH

SEQ ID NO: 5748 - protein, 11 aa, synthetic construct
RASQDISNYLN

SEQ ID NO: 5749 - protein, 11 aa, synthetic construct
RASQDISNYLN

SEQ ID NO: 5750 - protein, 11 aa, synthetic construct
RASQDISNYLN

SEQ ID NO: 5751 - protein, 14 aa, synthetic construct
RSSTGAVTTSNYAN

SEQ ID NO: 5752 - protein, 14 aa, synthetic construct
RSSTGAVTTSNYAN

SEQ ID NO: 5753 - protein, 14 aa, synthetic construct
RSSTGAVTTSNYAN

SEQ ID NO: 5754 - protein, 13 aa, synthetic construct
SSTGAVTTSNYAN

SEQ ID NO: 5755 - protein, 13 aa, synthetic construct
SSTGAVTTSNYAN

SEQ ID NO: 5756 - protein, 13 aa, synthetic construct
SSTGAVTTSNYAN

SEQ ID NO: 5757 - protein, 11 aa, synthetic construct
RASENIYSNLA

SEQ ID NO: 5758 - protein, 11 aa, synthetic construct
ITSTDIDDDMN

SEQ ID NO: 5759 - protein, 11 aa, synthetic construct
MTSIDIDDDMN

SEQ ID NO: 5760 - protein, 14 aa, synthetic construct
RSSTGAVTTSNYAN

SEQ ID NO: 5761 - protein, 15 aa, synthetic construct
KASQSVDYDGDSYMN

SEQ ID NO: 5762 - protein, 14 aa, synthetic construct
ASQSVDYDGDSYMN

SEQ ID NO: 5763 - protein, 17 aa, synthetic construct
KSSQSLLYSTNQKNYLA

SEQ ID NO: 5764 - protein, 14 aa, synthetic construct
RSSTGAVTTSNYAN

SEQ ID NO: 5765 - protein, 13 aa, synthetic construct
SSTGAVTTSNYAN

SEQ ID NO: 5766 - protein, 14 aa, synthetic construct
RSSTGAVTTSNYAN

SEQ ID NO: 5767 - protein, 15 aa, synthetic construct
KASQSVDYDGDSYMN

SEQ ID NO: 5768 - protein, 14 aa, synthetic construct
RSSTGAVTTSNYAN

SEQ ID NO: 5769 - protein, 11 aa, synthetic construct
RASENIYYSLA

SEQ ID NO: 5770 - protein, 17 aa, synthetic construct
KSSQSLLNSSNQKNYLA

SEQ ID NO: 5771 - protein, 16 aa, synthetic construct
SSQSLLNSSNQKNYLA

SEQ ID NO: 5772 - protein, 11 aa, synthetic construct
RASQDISNYLN

SEQ ID NO: 5773 - protein, 10 aa, synthetic construct
ASQDISNYLN

SEQ ID NO: 5774 - protein, 11 aa, synthetic construct
RASQDISNYLN

SEQ ID NO: 5775 - protein, 11 aa, synthetic construct
RASENIYSNLA

SEQ ID NO: 5776 - protein, 11 aa, synthetic construct
QATQDIVKNLN

SEQ ID NO: 5777 - protein, 10 aa, synthetic construct
ATQDIVKNLN

SEQ ID NO: 5778 - protein, 10 aa, synthetic construct
SASSSVSYMY

SEQ ID NO: 5779 - protein, 15 aa, synthetic construct
KASQSVDYDGDSYMN

SEQ ID NO: 5780 - protein, 14 aa, synthetic construct
ASQSVDYDGDSYMN

SEQ ID NO: 5781 - protein, 14 aa, synthetic construct
RSSTGAVTTSNYAN

SEQ ID NO: 5782 - protein, 11 aa, synthetic construct
QATQDIVKNLN

SEQ ID NO: 5783 - protein, 10 aa, synthetic construct
ATQDIVKNLN

SEQ ID NO: 5784 - protein, 16 aa, synthetic construct
TLSSQHSTYTIEWYQQ

SEQ ID NO: 5785 - protein, 15 aa, synthetic construct
KASQSVDYDGDSYMN

SEQ ID NO: 5786 - protein, 11 aa, synthetic construct
RASQDIGISLN

SEQ ID NO: 5787 - protein, 10 aa, synthetic construct
RASENIYSYL

SEQ ID NO: 5788 - protein, 10 aa, synthetic construct
SASSSVSYMH

SEQ ID NO: 5789 - protein, 9 aa, synthetic construct
ASSSVSYMH

SEQ ID NO: 5790 - protein, 11 aa, synthetic construct
KASQDINSYLS

SEQ ID NO: 5791 - protein, 10 aa, synthetic construct
ASQDINSYLS

SEQ ID NO: 5792 - protein, 11 aa, synthetic construct
RASQDIHGYLN

SEQ ID NO: 5793 - protein, 10 aa, synthetic construct
ASQDIHGYLN

SEQ ID NO: 5794 - protein, 11 aa, synthetic construct
KASQDVGTAVA

SEQ ID NO: 5795 - protein, 10 aa, synthetic construct
ASQDVGTAVA

SEQ ID NO: 5796 - protein, 11 aa, synthetic construct
KASQSVSNDVA

SEQ ID NO: 5797 - protein, 10 aa, synthetic construct
ASQSVSNDVA

SEQ ID NO: 5798 - protein, 14 aa, synthetic construct
RSSTGAVTTSNYAN

SEQ ID NO: 5799 - protein, 15 aa, synthetic construct
KASQSVDYDGDSYMN

SEQ ID NO: 5800 - protein, 10 aa, synthetic construct
SASSSVSYMH

SEQ ID NO: 5801 - protein, 11 aa, synthetic construct
ITSTDIDDDMN

SEQ ID NO: 5802 - protein, 11 aa, synthetic construct
RASENIYSNLA

SEQ ID NO: 5803 - protein, 10 aa, synthetic construct
SASSSVSYMH

SEQ ID NO: 5804 - protein, 11 aa, synthetic construct
ITSTDIDDDMN

SEQ ID NO: 5805 - protein, 10 aa, synthetic construct
TSTDIDDDMN

SEQ ID NO: 5806 - protein, 11 aa, synthetic construct
RASQDISNYLN

SEQ ID NO: 5807 - protein, 10 aa, synthetic construct
ASQDISNYLN

SEQ ID NO: 5808 - protein, 11 aa, synthetic construct
SASQGISNYLN

SEQ ID NO: 5809 - protein, 10 aa, synthetic construct
ASQGISNYLN

SEQ ID NO: 5810 - protein, 11 aa, synthetic construct
RASQSISDYLH

SEQ ID NO: 5811 - protein, 10 aa, synthetic construct
ASQSISDYLH

SEQ ID NO: 5812 - protein, 11 aa, synthetic construct
QATQDIVKNLN

SEQ ID NO: 5813 - protein, 10 aa, synthetic construct
ATQDIVKNLN

SEQ ID NO: 5814 - protein, 10 aa, synthetic construct
ATQDIVKNLN

SEQ ID NO: 5815 - protein, 11 aa, synthetic construct
RASGNIHNYLA

SEQ ID NO: 5816 - protein, 10 aa, synthetic construct
ASGNIHNYLA

SEQ ID NO: 5817 - protein, 14 aa, synthetic construct
RSSTGAVTTSNYAN

SEQ ID NO: 5818 - protein, 13 aa, synthetic construct
SSTGAVTTSNYAN

SEQ ID NO: 5819 - protein, 11 aa, synthetic construct
RASQEISGYLS

SEQ ID NO: 5820 - protein, 10 aa, synthetic construct
ASQEISGYLS

SEQ ID NO: 5821 - protein, 15 aa, synthetic construct
KASQSVDYDGDSYMN

SEQ ID NO: 5822 - protein, 11 aa, synthetic construct
HASQNINVWLS

SEQ ID NO: 5823 - protein, 10 aa, synthetic construct
SASSSVSYMH

SEQ ID NO: 5824 - protein, 11 aa, synthetic construct
RASGNIHNYLA

SEQ ID NO: 5825 - protein, 11 aa, synthetic construct
RASENIYSYLA

SEQ ID NO: 5826 - protein, 10 aa, synthetic construct
RASSSVNYMY

SEQ ID NO: 5827 - protein, 14 aa, synthetic construct
RSSTGAVTTSNYAN

SEQ ID NO: 5828 - protein, 11 aa, synthetic construct
KASQDVGTAVA

SEQ ID NO: 5829 - protein, 11 aa, synthetic construct
KASQDINSYLS

SEQ ID NO: 5830 - protein, 11 aa, synthetic construct
RASENIYSNLA

SEQ ID NO: 5831 - protein, 11 aa, synthetic construct
RASQSISDYLH

SEQ ID NO: 5832 - protein, 10 aa, synthetic construct
ASQSISDYLH

SEQ ID NO: 5833 - protein, 11 aa, synthetic construct
RASENIYSNLA

SEQ ID NO: 5834 - protein, 14 aa, synthetic construct
RSSTGAVTTSNYAN

SEQ ID NO: 5835 - protein, 11 aa, synthetic construct
ITSTDIDDDMN

SEQ ID NO: 5836 - protein, 10 aa, synthetic construct
SASSSVSYMH

SEQ ID NO: 5837 - protein, 10 aa, synthetic construct
SASSSVSYMH

SEQ ID NO: 5838 - protein, 11 aa, synthetic construct
ITSTDIDDDMN

SEQ ID NO: 5839 - protein, 12 aa, synthetic construct
SASSSVSSSYLY

SEQ ID NO: 5840 - protein, 16 aa, synthetic construct
TLSSQHSTYTIEWYQQ

SEQ ID NO: 5841 - protein, 16 aa, synthetic construct
RSSQSIVHSNGNTYLE

SEQ ID NO: 5842 - protein, 11 aa, synthetic construct
KASQDINSYLS

SEQ ID NO: 5843 - protein, 16 aa, synthetic construct
KSSQSLLDSDGKTYLN

SEQ ID NO: 5844 - protein, 12 aa, synthetic construct
SASSSVSSSYLY

SEQ ID NO: 5845 - protein, 16 aa, synthetic construct
RSSQSIVYSNGNTYLE

SEQ ID NO: 5846 - protein, 11 aa, synthetic construct
RASENIYNNLA

SEQ ID NO: 5847 - protein, 12 aa, synthetic construct
SASSSVSSSYLY

SEQ ID NO: 5848 - protein, 10 aa, synthetic construct
SASSSVSYMY

SEQ ID NO: 5849 - protein, 10 aa, synthetic construct
SASSSVSYMY

SEQ ID NO: 5850 - protein, 10 aa, synthetic construct
RASSSVSYMH

SEQ ID NO: 5851 - protein, 11 aa, synthetic construct
RASENIYSNLA

SEQ ID NO: 5852 - protein, 11 aa, synthetic construct
KASQDVSTAVA

SEQ ID NO: 5853 - protein, 16 aa, synthetic construct
KSSQSLLDSDGKTYLN

SEQ ID NO: 5854 - protein, 16 aa, synthetic construct
RSSQSIVHSNGNTYLE

SEQ ID NO: 5855 - protein, 11 aa, synthetic construct
ITSTDIDDDMN

SEQ ID NO: 5856 - protein, 11 aa, synthetic construct
KASQDINKYIA

SEQ ID NO: 5857 - protein, 11 aa, synthetic construct
HASQNINVWLS

SEQ ID NO: 5858 - protein, 10 aa, synthetic construct
SASSSVSYMY

SEQ ID NO: 5859 - protein, 16 aa, synthetic construct
KSSQSLLDSDGKTYLN

SEQ ID NO: 5860 - protein, 10 aa, synthetic construct
SASLSVSDMY

SEQ ID NO: 5861 - protein, 12 aa, synthetic construct
SASSSVSSSYLY

SEQ ID NO: 5862 - protein, 10 aa, synthetic construct
RASSSVNYMY

SEQ ID NO: 5863 - protein, 9 aa, synthetic construct
ASSSVNYMY

SEQ ID NO: 5864 - protein, 11 aa, synthetic construct
ITNTDIDDDMN

SEQ ID NO: 5865 - protein, 10 aa, synthetic construct
TNTDIDDDMN

SEQ ID NO: 5866 - protein, 15 aa, synthetic construct
KASQSVDYDGDSYMN

SEQ ID NO: 5867 - protein, 11 aa, synthetic construct
RASQSISNNLH

SEQ ID NO: 5868 - protein, 12 aa, synthetic construct
SASSSVSSSYLY

SEQ ID NO: 5869 - protein, 11 aa, synthetic construct
ITSTDIDDDMN

SEQ ID NO: 5870 - protein, 16 aa, synthetic construct
KSSQSLLDSDGKTYLH

SEQ ID NO: 5871 - protein, 11 aa, synthetic construct
KASQDINKYIA

SEQ ID NO: 5872 - protein, 14 aa, synthetic construct
RSSTGAVTTSNYAN

SEQ ID NO: 5873 - protein, 11 aa, synthetic construct
KASENVGTYVS

SEQ ID NO: 5874 - protein, 15 aa, synthetic construct
RASETVDSYGYSFMH

SEQ ID NO: 5875 - protein, 17 aa, synthetic construct
KSSQSLLYSTNQKNYLA

SEQ ID NO: 5876 - protein, 16 aa, synthetic construct
KSSQSLLDSDGKTYLN

SEQ ID NO: 5877 - protein, 15 aa, synthetic construct
KASQSVDYDGDSYMN

SEQ ID NO: 5878 - protein, 16 aa, synthetic construct
TLSSQHSTYTIEWYQQ

SEQ ID NO: 5879 - protein, 15 aa, synthetic construct
LSSQHSTYTIEWYQQ

SEQ ID NO: 5880 - protein, 10 aa, synthetic construct
SASSSVSYMH

SEQ ID NO: 5881 - protein, 9 aa, synthetic construct
ASSSVSYMH

SEQ ID NO: 5882 - protein, 11 aa, synthetic construct
QATQDIVKNLN

SEQ ID NO: 5883 - protein, 15 aa, synthetic construct
RASESVDNYGISFMN

SEQ ID NO: 5884 - protein, 11 aa, synthetic construct
RASQSISDYLH

SEQ ID NO: 5885 - protein, 16 aa, synthetic construct
RSSQSIVHSNGDTYLE

SEQ ID NO: 5886 - protein, 10 aa, synthetic construct
SASSSVSYMH

SEQ ID NO: 5887 - protein, 17 aa, synthetic construct
TASESLYSSKHKVHYLA

SEQ ID NO: 5888 - protein, 16 aa, synthetic construct
TLSSQHSTYTIEWYQQ

SEQ ID NO: 5889 - protein, 15 aa, synthetic construct
RASQSVSTSSYSYMH

SEQ ID NO: 5890 - protein, 10 aa, synthetic construct
SASSSVSYMH

SEQ ID NO: 5891 - protein, 11 aa, synthetic construct
KASDHINNWLA

SEQ ID NO: 5892 - protein, 11 aa, synthetic construct
RASENIYSYLA

SEQ ID NO: 5893 - protein, 11 aa, synthetic construct
RASENIYSYLA

SEQ ID NO: 5894 - protein, 10 aa, synthetic construct
SASSSVSYMH

SEQ ID NO: 5895 - protein, 15 aa, synthetic construct
RASESVDNYGISFMN

SEQ ID NO: 5896 - protein, 17 aa, synthetic construct
TASESLYSSKHKVHYLA

SEQ ID NO: 5897 - protein, 14 aa, synthetic construct
RSSTGAVTTSNYAN

SEQ ID NO: 5898 - protein, 10 aa, synthetic construct
SASSSISYMH

SEQ ID NO: 5899-6153 - skipped (255 entries)

SEQ ID NO: 6154 - protein, 7 aa, synthetic construct
RANRLVD

SEQ ID NO: 6155 - protein, 7 aa, synthetic construct
RANRLVD

SEQ ID NO: 6156 - protein, 7 aa, synthetic construct
RANRLVD

SEQ ID NO: 6157 - protein, 7 aa, synthetic construct
RANRLVD

SEQ ID NO: 6158 - protein, 7 aa, synthetic construct
RANRLVD

SEQ ID NO: 6159 - protein, 7 aa, synthetic construct
RANRLVD

SEQ ID NO: 6160 - protein, 7 aa, synthetic construct
RANRLVD

SEQ ID NO: 6161 - protein, 7 aa, synthetic construct
RANRLVD

SEQ ID NO: 6162 - protein, 7 aa, synthetic construct
RANRLVD

SEQ ID NO: 6163 - protein, 7 aa, synthetic construct
RANRLVD

SEQ ID NO: 6164 - protein, 7 aa, synthetic construct
RANRLVD

SEQ ID NO: 6165 - protein, 7 aa, synthetic construct
RANRLVD

SEQ ID NO: 6166 - protein, 7 aa, synthetic construct
RANRLVD

SEQ ID NO: 6167 - protein, 7 aa, synthetic construct
RANRLVD

SEQ ID NO: 6168 - protein, 7 aa, synthetic construct
RANRLVD

SEQ ID NO: 6169 - protein, 7 aa, synthetic construct
RANRLVD

SEQ ID NO: 6170 - protein, 7 aa, synthetic construct
RANRLVD

SEQ ID NO: 6171 - protein, 7 aa, synthetic construct
RAKRLVD

SEQ ID NO: 6172 - protein, 7 aa, synthetic construct
RANRLVD

SEQ ID NO: 6173 - protein, 7 aa, synthetic construct
RANRLVD

SEQ ID NO: 6174 - protein, 7 aa, synthetic construct
RAKRLVD

SEQ ID NO: 6175 - protein, 7 aa, synthetic construct
RANRLVD

SEQ ID NO: 6176 - protein, 7 aa, synthetic construct
RAKRLVD

SEQ ID NO: 6177 - protein, 7 aa, synthetic construct
RANRLVD

SEQ ID NO: 6178 - protein, 7 aa, synthetic construct
RANRLVD

SEQ ID NO: 6179 - protein, 7 aa, synthetic construct
RANRLVD

SEQ ID NO: 6180 - protein, 7 aa, synthetic construct
RANRLVD

SEQ ID NO: 6181 - protein, 7 aa, synthetic construct
RANRLVD

SEQ ID NO: 6182 - protein, 7 aa, synthetic construct
RANRLVD

SEQ ID NO: 6183 - protein, 7 aa, synthetic construct
RANRLVD

SEQ ID NO: 6184 - protein, 7 aa, synthetic construct
RANRLVD

SEQ ID NO: 6185 - protein, 7 aa, synthetic construct
RANRLVD

SEQ ID NO: 6186 - protein, 7 aa, synthetic construct
RANRLVD

SEQ ID NO: 6187 - protein, 7 aa, synthetic construct
RANRLVD

SEQ ID NO: 6188 - protein, 7 aa, synthetic construct
RANRLVD

SEQ ID NO: 6189 - protein, 7 aa, synthetic construct
RANRLVD

SEQ ID NO: 6190 - protein, 7 aa, synthetic construct
RANRLVD

SEQ ID NO: 6191 - protein, 7 aa, synthetic construct
AATYLAD

SEQ ID NO: 6192 - protein, 7 aa, synthetic construct
AATNLAD

SEQ ID NO: 6193 - protein, 7 aa, synthetic construct
AATNLAD

SEQ ID NO: 6194 - protein, 7 aa, synthetic construct
AATNLAD

SEQ ID NO: 6195 - protein, 7 aa, synthetic construct
AATNLAD

SEQ ID NO: 6196 - protein, 7 aa, synthetic construct
AATNVAD

SEQ ID NO: 6197 - protein, 7 aa, synthetic construct
AATNLAD

SEQ ID NO: 6198 - protein, 7 aa, synthetic construct
AATNLAD

SEQ ID NO: 6199 - protein, 7 aa, synthetic construct
AATNLAD

SEQ ID NO: 6200 - protein, 7 aa, synthetic construct
AATYLAD

SEQ ID NO: 6201 - protein, 7 aa, synthetic construct
AATNLAD

SEQ ID NO: 6202 - protein, 7 aa, synthetic construct
AATNLAD

SEQ ID NO: 6203 - protein, 7 aa, synthetic construct
AATYLAD

SEQ ID NO: 6204 - protein, 7 aa, synthetic construct
RANRLVD

SEQ ID NO: 6205 - protein, 7 aa, synthetic construct
GASNRYT

SEQ ID NO: 6206 - protein, 7 aa, synthetic construct
GASNRYT

SEQ ID NO: 6207 - protein, 7 aa, synthetic construct
GASNRYT

SEQ ID NO: 6208 - protein, 7 aa, synthetic construct
GASNRYT

SEQ ID NO: 6209 - protein, 7 aa, synthetic construct
GASNRYT

SEQ ID NO: 6210 - protein, 7 aa, synthetic construct
GASNRYT

SEQ ID NO: 6211 - protein, 7 aa, synthetic construct
RANRLVD

SEQ ID NO: 6212 - protein, 7 aa, synthetic construct
GASNRYT

SEQ ID NO: 6213 - protein, 7 aa, synthetic construct
GASNRYT

SEQ ID NO: 6214 - protein, 7 aa, synthetic construct
GASNRYT

SEQ ID NO: 6215 - protein, 7 aa, synthetic construct
GASNRYT

SEQ ID NO: 6216 - protein, 7 aa, synthetic construct
DTSKLAS

SEQ ID NO: 6217 - protein, 7 aa, synthetic construct
DTSKLAS

SEQ ID NO: 6218 - protein, 7 aa, synthetic construct
DTSKLAS

SEQ ID NO: 6219 - protein, 7 aa, synthetic construct
DTSKLAS

SEQ ID NO: 6220 - protein, 7 aa, synthetic construct
DTSKLAS

SEQ ID NO: 6221 - protein, 7 aa, synthetic construct
DTSKLAS

SEQ ID NO: 6222 - protein, 7 aa, synthetic construct
DTSKLAS

SEQ ID NO: 6223 - protein, 7 aa, synthetic construct
AASNLES

SEQ ID NO: 6224 - protein, 7 aa, synthetic construct
AASNLES

SEQ ID NO: 6225 - protein, 7 aa, synthetic construct
AASNLQS

SEQ ID NO: 6226 - protein, 7 aa, synthetic construct
AASNLES

SEQ ID NO: 6227 - protein, 7 aa, synthetic construct
AASNLES

SEQ ID NO: 6228 - protein, 7 aa, synthetic construct
AASNLES

SEQ ID NO: 6229 - protein, 7 aa, synthetic construct
AASNLES

SEQ ID NO: 6230 - protein, 7 aa, synthetic construct
AASNLQS

SEQ ID NO: 6231 - protein, 7 aa, synthetic construct
AASNLES

SEQ ID NO: 6232 - protein, 7 aa, synthetic construct
YTSTLQP

SEQ ID NO: 6233 - protein, 7 aa, synthetic construct
YTSTLQP

SEQ ID NO: 6234 - protein, 7 aa, synthetic construct
YTSTLQP

SEQ ID NO: 6235 - protein, 7 aa, synthetic construct
YATELAE

SEQ ID NO: 6236 - protein, 7 aa, synthetic construct
YATELAE

SEQ ID NO: 6237 - protein, 7 aa, synthetic construct
YATELAE

SEQ ID NO: 6238 - protein, 7 aa, synthetic construct
YATELAE

SEQ ID NO: 6239 - protein, 7 aa, synthetic construct
YATELAE

SEQ ID NO: 6240 - protein, 7 aa, synthetic construct
YTSNLAP

SEQ ID NO: 6241 - protein, 7 aa, synthetic construct
YTSNLAP

SEQ ID NO: 6242 - protein, 7 aa, synthetic construct
YTSNLAP

SEQ ID NO: 6243 - protein, 7 aa, synthetic construct
AASNLES

SEQ ID NO: 6244 - protein, 7 aa, synthetic construct
AASNLES

SEQ ID NO: 6245 - protein, 7 aa, synthetic construct
AASNLES

SEQ ID NO: 6246 - protein, 7 aa, synthetic construct
AASNLES

SEQ ID NO: 6247 - protein, 7 aa, synthetic construct
AASNLES

SEQ ID NO: 6248 - protein, 7 aa, synthetic construct
AASNLES

SEQ ID NO: 6249 - protein, 7 aa, synthetic construct
AASNLES

SEQ ID NO: 6250 - protein, 7 aa, synthetic construct
AASNLES

SEQ ID NO: 6251 - protein, 7 aa, synthetic construct
AASNLES

SEQ ID NO: 6252 - protein, 7 aa, synthetic construct
YASNLES

SEQ ID NO: 6253 - protein, 7 aa, synthetic construct
YASNLES

SEQ ID NO: 6254 - protein, 7 aa, synthetic construct
YASNLES

SEQ ID NO: 6255 - protein, 7 aa, synthetic construct
YASNLES

SEQ ID NO: 6256 - protein, 7 aa, synthetic construct
YASNLES

SEQ ID NO: 6257 - protein, 7 aa, synthetic construct
YASNLES

SEQ ID NO: 6258 - protein, 7 aa, synthetic construct
STSRLHS

SEQ ID NO: 6259 - protein, 7 aa, synthetic construct
STSRLHS

SEQ ID NO: 6260 - protein, 7 aa, synthetic construct
STSRLHS

SEQ ID NO: 6261 - protein, 7 aa, synthetic construct
GTSNRAP

SEQ ID NO: 6262 - protein, 7 aa, synthetic construct
GTSNRAP

SEQ ID NO: 6263 - protein, 7 aa, synthetic construct
GTSNRAP

SEQ ID NO: 6264 - protein, 7 aa, synthetic construct
GTSNRAP

SEQ ID NO: 6265 - protein, 7 aa, synthetic construct
GTSNRAP

SEQ ID NO: 6266 - protein, 7 aa, synthetic construct
GTSNRAP

SEQ ID NO: 6267 - protein, 7 aa, synthetic construct
AATNLAD

SEQ ID NO: 6268 - protein, 7 aa, synthetic construct
EGNTLRP

SEQ ID NO: 6269 - protein, 7 aa, synthetic construct
EGNTLRP

SEQ ID NO: 6270 - protein, 7 aa, synthetic construct
GTSNRAP

SEQ ID NO: 6271 - protein, 7 aa, synthetic construct
AASNLES

SEQ ID NO: 6272 - protein, 7 aa, synthetic construct
AASNLES

SEQ ID NO: 6273 - protein, 7 aa, synthetic construct
WASTRES

SEQ ID NO: 6274 - protein, 7 aa, synthetic construct
GTSNRAP

SEQ ID NO: 6275 - protein, 7 aa, synthetic construct
GTSNRAP

SEQ ID NO: 6276 - protein, 7 aa, synthetic construct
GTNNRAP

SEQ ID NO: 6277 - protein, 7 aa, synthetic construct
AASNLES

SEQ ID NO: 6278 - protein, 7 aa, synthetic construct
GTNNRAP

SEQ ID NO: 6279 - protein, 7 aa, synthetic construct
NANSLED

SEQ ID NO: 6280 - protein, 7 aa, synthetic construct
FASTRES

SEQ ID NO: 6281 - protein, 7 aa, synthetic construct
FASTRES

SEQ ID NO: 6282 - protein, 7 aa, synthetic construct
YTSRLHS

SEQ ID NO: 6283 - protein, 7 aa, synthetic construct
YTSRLHS

SEQ ID NO: 6284 - protein, 7 aa, synthetic construct
YTSRLHS

SEQ ID NO: 6285 - protein, 7 aa, synthetic construct
AATNLAD

SEQ ID NO: 6286 - protein, 7 aa, synthetic construct
YATELAE

SEQ ID NO: 6287 - protein, 7 aa, synthetic construct
YATELAE

SEQ ID NO: 6288 - protein, 7 aa, synthetic construct
DTSNLAS

SEQ ID NO: 6289 - protein, 7 aa, synthetic construct
AASNLES

SEQ ID NO: 6290 - protein, 7 aa, synthetic construct
AASNLES

SEQ ID NO: 6291 - protein, 7 aa, synthetic construct
GTNNRAP

SEQ ID NO: 6292 - protein, 7 aa, synthetic construct
YATELAE

SEQ ID NO: 6293 - protein, 7 aa, synthetic construct
YATELAE

SEQ ID NO: 6294 - protein, 7 aa, synthetic construct
GSHSTGD

SEQ ID NO: 6295 - protein, 7 aa, synthetic construct
AASNLES

SEQ ID NO: 6296 - protein, 7 aa, synthetic construct
ATSSLDS

SEQ ID NO: 6297 - protein, 7 aa, synthetic construct
YNAKNLA

SEQ ID NO: 6298 - protein, 7 aa, synthetic construct
STSNLAS

SEQ ID NO: 6299 - protein, 7 aa, synthetic construct
STSNLAS

SEQ ID NO: 6300 - protein, 7 aa, synthetic construct
RANRLVD

SEQ ID NO: 6301 - protein, 7 aa, synthetic construct
RANRLVD

SEQ ID NO: 6302 - protein, 7 aa, synthetic construct
ETSNLDS

SEQ ID NO: 6303 - protein, 7 aa, synthetic construct
ETSNLDS

SEQ ID NO: 6304 - protein, 7 aa, synthetic construct
WASTRHT

SEQ ID NO: 6305 - protein, 7 aa, synthetic construct
WASTRHT

SEQ ID NO: 6306 - protein, 7 aa, synthetic construct
YASNRYT

SEQ ID NO: 6307 - protein, 7 aa, synthetic construct
YASNRYT

SEQ ID NO: 6308 - protein, 7 aa, synthetic construct
GTNNRAP

SEQ ID NO: 6309 - protein, 7 aa, synthetic construct
VASNLES

SEQ ID NO: 6310 - protein, 7 aa, synthetic construct
DTSKLAS

SEQ ID NO: 6311 - protein, 7 aa, synthetic construct
EGNTLRP

SEQ ID NO: 6312 - protein, 7 aa, synthetic construct
AATNLAD

SEQ ID NO: 6313 - protein, 7 aa, synthetic construct
STSNLAS

SEQ ID NO: 6314 - protein, 7 aa, synthetic construct
EGNTLRP

SEQ ID NO: 6315 - protein, 7 aa, synthetic construct
EGNTLRP

SEQ ID NO: 6316 - protein, 7 aa, synthetic construct
YTSRLHS

SEQ ID NO: 6317 - protein, 7 aa, synthetic construct
YTSRLHS

SEQ ID NO: 6318 - protein, 7 aa, synthetic construct
YTSSLHS

SEQ ID NO: 6319 - protein, 7 aa, synthetic construct
YTSSLHS

SEQ ID NO: 6320 - protein, 7 aa, synthetic construct
YASQSIS

SEQ ID NO: 6321 - protein, 7 aa, synthetic construct
YASQSIS

SEQ ID NO: 6322 - protein, 7 aa, synthetic construct
YATELAE

SEQ ID NO: 6323 - protein, 7 aa, synthetic construct
YATELAE

SEQ ID NO: 6324 - protein, 7 aa, synthetic construct
YATELAE

SEQ ID NO: 6325 - protein, 7 aa, synthetic construct
NAKTLAD

SEQ ID NO: 6326 - protein, 7 aa, synthetic construct
NAKTLAD

SEQ ID NO: 6327 - protein, 7 aa, synthetic construct
GTSYRAP

SEQ ID NO: 6328 - protein, 7 aa, synthetic construct
GTSYRAP

SEQ ID NO: 6329 - protein, 7 aa, synthetic construct
AASTLDS

SEQ ID NO: 6330 - protein, 7 aa, synthetic construct
AASTLDS

SEQ ID NO: 6331 - protein, 7 aa, synthetic construct
AASNLES

SEQ ID NO: 6332 - protein, 7 aa, synthetic construct
KASNLHT

SEQ ID NO: 6333 - protein, 7 aa, synthetic construct
DTSKLAS

SEQ ID NO: 6334 - protein, 7 aa, synthetic construct
NAKTLAD

SEQ ID NO: 6335 - protein, 7 aa, synthetic construct
NAKTLAE

SEQ ID NO: 6336 - protein, 7 aa, synthetic construct
YTSNLAP

SEQ ID NO: 6337 - protein, 7 aa, synthetic construct
STNNRAP

SEQ ID NO: 6338 - protein, 7 aa, synthetic construct
WASTRHT

SEQ ID NO: 6339 - protein, 7 aa, synthetic construct
RANRLVD

SEQ ID NO: 6340 - protein, 7 aa, synthetic construct
AATNLAD

SEQ ID NO: 6341 - protein, 7 aa, synthetic construct
YASQSIS

SEQ ID NO: 6342 - protein, 7 aa, synthetic construct
YASQSIS

SEQ ID NO: 6343 - protein, 7 aa, synthetic construct
AATNLAD

SEQ ID NO: 6344 - protein, 7 aa, synthetic construct
GTNNRAP

SEQ ID NO: 6345 - protein, 7 aa, synthetic construct
EGNTLRP

SEQ ID NO: 6346 - protein, 7 aa, synthetic construct
STSNLAS

SEQ ID NO: 6347 - protein, 7 aa, synthetic construct
DTSKLAS

SEQ ID NO: 6348 - protein, 7 aa, synthetic construct
EGNSLRP

SEQ ID NO: 6349 - protein, 7 aa, synthetic construct
STSNLAS

SEQ ID NO: 6350 - protein, 7 aa, synthetic construct
GSHSTGD

SEQ ID NO: 6351 - protein, 7 aa, synthetic construct
KVSNRFS

SEQ ID NO: 6352 - protein, 7 aa, synthetic construct
RANRLVD

SEQ ID NO: 6353 - protein, 7 aa, synthetic construct
LVSKLDS

SEQ ID NO: 6354 - protein, 7 aa, synthetic construct
STSNLAS

SEQ ID NO: 6355 - protein, 7 aa, synthetic construct
KVSNRFS

SEQ ID NO: 6356 - protein, 7 aa, synthetic construct
AATNLAD

SEQ ID NO: 6357 - protein, 7 aa, synthetic construct
STSNLAS

SEQ ID NO: 6358 - protein, 7 aa, synthetic construct
DTSNLAS

SEQ ID NO: 6359 - protein, 7 aa, synthetic construct
DTSNLAS

SEQ ID NO: 6360 - protein, 7 aa, synthetic construct
ATSNLAS

SEQ ID NO: 6361 - protein, 7 aa, synthetic construct
AATNLAD

SEQ ID NO: 6362 - protein, 7 aa, synthetic construct
WASTRHT

SEQ ID NO: 6363 - protein, 7 aa, synthetic construct
LVSKLDS

SEQ ID NO: 6364 - protein, 7 aa, synthetic construct
KVSNRFS

SEQ ID NO: 6365 - protein, 7 aa, synthetic construct
EGNTLRP

SEQ ID NO: 6366 - protein, 7 aa, synthetic construct
YTSTLQP

SEQ ID NO: 6367 - protein, 7 aa, synthetic construct
KASNLHT

SEQ ID NO: 6368 - protein, 7 aa, synthetic construct
LTSNLAS

SEQ ID NO: 6369 - protein, 7 aa, synthetic construct
LVSKLDS

SEQ ID NO: 6370 - protein, 7 aa, synthetic construct
DTSNLAS

SEQ ID NO: 6371 - protein, 7 aa, synthetic construct
STSNLAS

SEQ ID NO: 6372 - protein, 7 aa, synthetic construct
YTSNLAP

SEQ ID NO: 6373 - protein, 7 aa, synthetic construct
YTSNLAP

SEQ ID NO: 6374 - protein, 7 aa, synthetic construct
EGNTLRP

SEQ ID NO: 6375 - protein, 7 aa, synthetic construct
EGNTLRP

SEQ ID NO: 6376 - protein, 7 aa, synthetic construct
AASNLES

SEQ ID NO: 6377 - protein, 7 aa, synthetic construct
YASQSIS

SEQ ID NO: 6378 - protein, 7 aa, synthetic construct
STSNLAS

SEQ ID NO: 6379 - protein, 7 aa, synthetic construct
EGNTLRP

SEQ ID NO: 6380 - protein, 7 aa, synthetic construct
LVSKLDS

SEQ ID NO: 6381 - protein, 7 aa, synthetic construct
YTSTLQP

SEQ ID NO: 6382 - protein, 7 aa, synthetic construct
GTNNRAP

SEQ ID NO: 6383 - protein, 7 aa, synthetic construct
GASNRYT

SEQ ID NO: 6384 - protein, 7 aa, synthetic construct
RASNLES

SEQ ID NO: 6385 - protein, 7 aa, synthetic construct
WASTRES

SEQ ID NO: 6386 - protein, 7 aa, synthetic construct
LVSKLDS

SEQ ID NO: 6387 - protein, 7 aa, synthetic construct
AASNLES

SEQ ID NO: 6388 - protein, 7 aa, synthetic construct
GSHSTGD

SEQ ID NO: 6389 - protein, 7 aa, synthetic construct
GSHSTGD

SEQ ID NO: 6390 - protein, 7 aa, synthetic construct
DTSKLAS

SEQ ID NO: 6391 - protein, 7 aa, synthetic construct
DTSKLAS

SEQ ID NO: 6392 - protein, 7 aa, synthetic construct
YATELAE

SEQ ID NO: 6393 - protein, 7 aa, synthetic construct
AASNQGS

SEQ ID NO: 6394 - protein, 7 aa, synthetic construct
YASQSIS

SEQ ID NO: 6395 - protein, 7 aa, synthetic construct
KVSNRFS

SEQ ID NO: 6396 - protein, 7 aa, synthetic construct
DTSKLAS

SEQ ID NO: 6397 - protein, 7 aa, synthetic construct
GASNRYI

SEQ ID NO: 6398 - protein, 7 aa, synthetic construct
GSHSTGD

SEQ ID NO: 6399 - protein, 7 aa, synthetic construct
YASNLES

SEQ ID NO: 6400 - protein, 7 aa, synthetic construct
DTSKLAS

SEQ ID NO: 6401 - protein, 7 aa, synthetic construct
GATSLET

SEQ ID NO: 6402 - protein, 7 aa, synthetic construct
NAKTLAE

SEQ ID NO: 6403 - protein, 7 aa, synthetic construct
NAKTLAE

SEQ ID NO: 6404 - protein, 7 aa, synthetic construct
DTSKLAS

SEQ ID NO: 6405 - protein, 7 aa, synthetic construct
AASNQGS

SEQ ID NO: 6406 - protein, 7 aa, synthetic construct
GASNRYI

SEQ ID NO: 6407 - protein, 7 aa, synthetic construct
GTSNRAP

SEQ ID NO: 6408 - protein, 7 aa, synthetic construct
DTSKLAS

SEQ ID NO: 6409-6663 - skipped (255 entries)

SEQ ID NO: 6664 - protein, 9 aa, synthetic construct
LHYDEFPPT

SEQ ID NO: 6665 - protein, 9 aa, synthetic construct
LQYDEFPPT

SEQ ID NO: 6666 - protein, 9 aa, synthetic construct
LQYDEFPPT

SEQ ID NO: 6667 - protein, 9 aa, synthetic construct
LQYDEFPPT

SEQ ID NO: 6668 - protein, 9 aa, synthetic construct
LQYDEFPPT

SEQ ID NO: 6669 - protein, 9 aa, synthetic construct
PQYVESPPT

SEQ ID NO: 6670 - protein, 9 aa, synthetic construct
LQYDEFPPT

SEQ ID NO: 6671 - protein, 9 aa, synthetic construct
LQYDEFPPT

SEQ ID NO: 6672 - protein, 9 aa, synthetic construct
LQYDEFPPT

SEQ ID NO: 6673 - protein, 9 aa, synthetic construct
LQYDEFPPT

SEQ ID NO: 6674 - protein, 9 aa, synthetic construct
LQYDEFPLT

SEQ ID NO: 6675 - protein, 9 aa, synthetic construct
LQYDEFPPT

SEQ ID NO: 6676 - protein, 9 aa, synthetic construct
LQYDEFPPT

SEQ ID NO: 6677 - protein, 9 aa, synthetic construct
LQYDEFPPT

SEQ ID NO: 6678 - protein, 9 aa, synthetic construct
LQYDEFPPT

SEQ ID NO: 6679 - protein, 9 aa, synthetic construct
LQYDEFPPT

SEQ ID NO: 6680 - protein, 9 aa, synthetic construct
LQYDEFPPT

SEQ ID NO: 6681 - protein, 9 aa, synthetic construct
LQYDEFPPT

SEQ ID NO: 6682 - protein, 9 aa, synthetic construct
LQYDEFPLT

SEQ ID NO: 6683 - protein, 9 aa, synthetic construct
LQYDEFPPT

SEQ ID NO: 6684 - protein, 9 aa, synthetic construct
LQYDEFPPT

SEQ ID NO: 6685 - protein, 9 aa, synthetic construct
LQYDEFPPT

SEQ ID NO: 6686 - protein, 9 aa, synthetic construct
LQYDEFPPT

SEQ ID NO: 6687 - protein, 9 aa, synthetic construct
LHYDEFPPT

SEQ ID NO: 6688 - protein, 9 aa, synthetic construct
LQYDEFPPT

SEQ ID NO: 6689 - protein, 9 aa, synthetic construct
LQYDEFPPT

SEQ ID NO: 6690 - protein, 9 aa, synthetic construct
LQYDEFPPT

SEQ ID NO: 6691 - protein, 9 aa, synthetic construct
LQYDEFPPT

SEQ ID NO: 6692 - protein, 9 aa, synthetic construct
LQYDEFPPT

SEQ ID NO: 6693 - protein, 9 aa, synthetic construct
LQYDEFPPT

SEQ ID NO: 6694 - protein, 9 aa, synthetic construct
LQYDEFPPT

SEQ ID NO: 6695 - protein, 9 aa, synthetic construct
LQYDEFPPT

SEQ ID NO: 6696 - protein, 9 aa, synthetic construct
LQYDEFPPT

SEQ ID NO: 6697 - protein, 9 aa, synthetic construct
LQYDEFPPT

SEQ ID NO: 6698 - protein, 9 aa, synthetic construct
LQYDEFPPT

SEQ ID NO: 6699 - protein, 9 aa, synthetic construct
LQYDEFPPT

SEQ ID NO: 6700 - protein, 9 aa, synthetic construct
LQYDEFPPT

SEQ ID NO: 6701 - protein, 9 aa, synthetic construct
QHFWGTPWT

SEQ ID NO: 6702 - protein, 9 aa, synthetic construct
QHFWGTPWT

SEQ ID NO: 6703 - protein, 9 aa, synthetic construct
QHFWGSPWT

SEQ ID NO: 6704 - protein, 9 aa, synthetic construct
QHFWGTPWT

SEQ ID NO: 6705 - protein, 9 aa, synthetic construct
QHFWGTPWT

SEQ ID NO: 6706 - protein, 9 aa, synthetic construct
QHFWGTPWT

SEQ ID NO: 6707 - protein, 9 aa, synthetic construct
QHFWGTPWT

SEQ ID NO: 6708 - protein, 9 aa, synthetic construct
QHFWGTPWT

SEQ ID NO: 6709 - protein, 9 aa, synthetic construct
QHFWGTPWT

SEQ ID NO: 6710 - protein, 9 aa, synthetic construct
QHFWGTPWT

SEQ ID NO: 6711 - protein, 9 aa, synthetic construct
QHFWGSPWT

SEQ ID NO: 6712 - protein, 9 aa, synthetic construct
QHFWGTPWT

SEQ ID NO: 6713 - protein, 9 aa, synthetic construct
QHFWGTPWT

SEQ ID NO: 6714 - protein, 9 aa, synthetic construct
LQYDEFPPT

SEQ ID NO: 6715 - protein, 9 aa, synthetic construct
GQSYSYPFT

SEQ ID NO: 6716 - protein, 9 aa, synthetic construct
GQSYSYPFT

SEQ ID NO: 6717 - protein, 9 aa, synthetic construct
GQSYSYPFT

SEQ ID NO: 6718 - protein, 9 aa, synthetic construct
GQSYSYPFT

SEQ ID NO: 6719 - protein, 9 aa, synthetic construct
GQSYSYLIH

SEQ ID NO: 6720 - protein, 9 aa, synthetic construct
GQSYSYLIH

SEQ ID NO: 6721 - protein, 9 aa, synthetic construct
LQYDEFPPT

SEQ ID NO: 6722 - protein, 9 aa, synthetic construct
GQSYSYPFT

SEQ ID NO: 6723 - protein, 9 aa, synthetic construct
GQSYSYPFT

SEQ ID NO: 6724 - protein, 9 aa, synthetic construct
GQSYSYPFT

SEQ ID NO: 6725 - protein, 9 aa, synthetic construct
GQSYSYPFT

SEQ ID NO: 6726 - protein, 9 aa, synthetic construct
QQWSSNPLY

SEQ ID NO: 6727 - protein, 9 aa, synthetic construct
QQWSSNPHV

SEQ ID NO: 6728 - protein, 9 aa, synthetic construct
QQWSSNPLY

SEQ ID NO: 6729 - protein, 9 aa, synthetic construct
QQWSSNPLY

SEQ ID NO: 6730 - protein, 9 aa, synthetic construct
QQWSSNPLY

SEQ ID NO: 6731 - protein, 9 aa, synthetic construct
QQWSSNPLY

SEQ ID NO: 6732 - protein, 9 aa, synthetic construct
QQWSSNPLY

SEQ ID NO: 6733 - protein, 9 aa, synthetic construct
QQSNEDPLT

SEQ ID NO: 6734 - protein, 9 aa, synthetic construct
QQSNEDPLT

SEQ ID NO: 6735 - protein, 9 aa, synthetic construct
QQSNEDPLT

SEQ ID NO: 6736 - protein, 9 aa, synthetic construct
QQSNEDPLT

SEQ ID NO: 6737 - protein, 9 aa, synthetic construct
QQSNEDPLT

SEQ ID NO: 6738 - protein, 9 aa, synthetic construct
QQSNEDPLT

SEQ ID NO: 6739 - protein, 9 aa, synthetic construct
QQSNEDPLT

SEQ ID NO: 6740 - protein, 9 aa, synthetic construct
QQSNEDPLT

SEQ ID NO: 6741 - protein, 9 aa, synthetic construct
QQSNEDPLT

SEQ ID NO: 6742 - protein, 9 aa, synthetic construct
LQYDNLMYT

SEQ ID NO: 6743 - protein, 9 aa, synthetic construct
LQYDILMYT

SEQ ID NO: 6744 - protein, 9 aa, synthetic construct
LQYDILMYT

SEQ ID NO: 6745 - protein, 9 aa, synthetic construct
LQFYEFPLT

SEQ ID NO: 6746 - protein, 9 aa, synthetic construct
LQFYEFPLT

SEQ ID NO: 6747 - protein, 9 aa, synthetic construct
LQFYEFPLT

SEQ ID NO: 6748 - protein, 9 aa, synthetic construct
LQFYEFPLT

SEQ ID NO: 6749 - protein, 9 aa, synthetic construct
LQFYEFPLT

SEQ ID NO: 6750 - protein, 9 aa, synthetic construct
QQFTSSHTF

SEQ ID NO: 6751 - protein, 9 aa, synthetic construct
QQFTSSHTF

SEQ ID NO: 6752 - protein, 9 aa, synthetic construct
QQFTSSHTF

SEQ ID NO: 6753 - protein, 9 aa, synthetic construct
QQSNKDPLT

SEQ ID NO: 6754 - protein, 9 aa, synthetic construct
QQSNEDPLT

SEQ ID NO: 6755 - protein, 9 aa, synthetic construct
QQSNKDPFT

SEQ ID NO: 6756 - protein, 9 aa, synthetic construct
QQSNKDPLT

SEQ ID NO: 6757 - protein, 9 aa, synthetic construct
QQSNKDPLT

SEQ ID NO: 6758 - protein, 9 aa, synthetic construct
QQSNEDPLT

SEQ ID NO: 6759 - protein, 9 aa, synthetic construct
QQSNKDPFT

SEQ ID NO: 6760 - protein, 9 aa, synthetic construct
QQSNKDPFT

SEQ ID NO: 6761 - protein, 9 aa, synthetic construct
QQSNKDPFT

SEQ ID NO: 6762 - protein, 9 aa, synthetic construct
QHSWEIPLT

SEQ ID NO: 6763 - protein, 9 aa, synthetic construct
QHSWEIPLT

SEQ ID NO: 6764 - protein, 9 aa, synthetic construct
QHSWEIPLT

SEQ ID NO: 6765 - protein, 9 aa, synthetic construct
QHSWEIPLT

SEQ ID NO: 6766 - protein, 9 aa, synthetic construct
QHSWEIPLT

SEQ ID NO: 6767 - protein, 9 aa, synthetic construct
QHSWEIPLT

SEQ ID NO: 6768 - protein, 9 aa, synthetic construct
QQGNTLPWT

SEQ ID NO: 6769 - protein, 9 aa, synthetic construct
QQGNALPWT

SEQ ID NO: 6770 - protein, 9 aa, synthetic construct
QQGNTLPWT

SEQ ID NO: 6771 - protein, 9 aa, synthetic construct
ALWYSTHYV

SEQ ID NO: 6772 - protein, 9 aa, synthetic construct
ALWYSTHYV

SEQ ID NO: 6773 - protein, 9 aa, synthetic construct
ALWYSTHYV

SEQ ID NO: 6774 - protein, 9 aa, synthetic construct
ALWYSTHYV

SEQ ID NO: 6775 - protein, 9 aa, synthetic construct
ALWYSTHYV

SEQ ID NO: 6776 - protein, 9 aa, synthetic construct
ALWYSTHYV

SEQ ID NO: 6777 - protein, 9 aa, synthetic construct
QHFWGTPWT

SEQ ID NO: 6778 - protein, 9 aa, synthetic construct
LQSDNMPFT

SEQ ID NO: 6779 - protein, 9 aa, synthetic construct
LQSDNMPFT

SEQ ID NO: 6780 - protein, 9 aa, synthetic construct
ALWYSTHYF

SEQ ID NO: 6781 - protein, 9 aa, synthetic construct
QQSNEDPLT

SEQ ID NO: 6782 - protein, 9 aa, synthetic construct
QQSNEDPLT

SEQ ID NO: 6783 - protein, 9 aa, synthetic construct
QQYYSYPPW

SEQ ID NO: 6784 - protein, 9 aa, synthetic construct
ALWYSTHWV

SEQ ID NO: 6785 - protein, 9 aa, synthetic construct
ALWYSTHWV

SEQ ID NO: 6786 - protein, 9 aa, synthetic construct
ALWYSNHLF

SEQ ID NO: 6787 - protein, 9 aa, synthetic construct
QQSNEDPPT

SEQ ID NO: 6788 - protein, 9 aa, synthetic construct
ALWYSNHWV

SEQ ID NO: 6789 - protein, 9 aa, synthetic construct
KQAYDVPYT

SEQ ID NO: 6790 - protein, 9 aa, synthetic construct
QQHYSTPLT

SEQ ID NO: 6791 - protein, 9 aa, synthetic construct
QQHYSTPLT

SEQ ID NO: 6792 - protein, 9 aa, synthetic construct
QQDNTLPRT

SEQ ID NO: 6793 - protein, 9 aa, synthetic construct
QQDNTLPRT

SEQ ID NO: 6794 - protein, 9 aa, synthetic construct
QQGNTLPWT

SEQ ID NO: 6795 - protein, 9 aa, synthetic construct
QHFWGTPWT

SEQ ID NO: 6796 - protein, 9 aa, synthetic construct
LQFYEFPYT

SEQ ID NO: 6797 - protein, 9 aa, synthetic construct
LQFYEFPYT

SEQ ID NO: 6798 - protein, 9 aa, synthetic construct
QQWSSYPLT

SEQ ID NO: 6799 - protein, 9 aa, synthetic construct
QQSNEDPWT

SEQ ID NO: 6800 - protein, 9 aa, synthetic construct
QQSNEDPWT

SEQ ID NO: 6801 - protein, 9 aa, synthetic construct
ALWYSNHWV

SEQ ID NO: 6802 - protein, 9 aa, synthetic construct
LQFYEFPLT

SEQ ID NO: 6803 - protein, 9 aa, synthetic construct
LQFYEFPLT

SEQ ID NO: 6804 - protein, 9 aa, synthetic construct
GVGDTIKEQ

SEQ ID NO: 6805 - protein, 9 aa, synthetic construct
QQSNEDPPT

SEQ ID NO: 6806 - protein, 9 aa, synthetic construct
LQYASSPYT

SEQ ID NO: 6807 - protein, 9 aa, synthetic construct
QHFWGTPYT

SEQ ID NO: 6808 - protein, 9 aa, synthetic construct
QQRSSFPYT

SEQ ID NO: 6809 - protein, 9 aa, synthetic construct
QQRSSFPYT

SEQ ID NO: 6810 - protein, 9 aa, synthetic construct
LQYDEFPLT

SEQ ID NO: 6811 - protein, 9 aa, synthetic construct
LQYDEFPLT

SEQ ID NO: 6812 - protein, 9 aa, synthetic construct
LQYASSPLT

SEQ ID NO: 6813 - protein, 9 aa, synthetic construct
LQYASSPLT

SEQ ID NO: 6814 - protein, 9 aa, synthetic construct
QQYSSYPFT

SEQ ID NO: 6815 - protein, 9 aa, synthetic construct
QQYSSYPFT

SEQ ID NO: 6816 - protein, 9 aa, synthetic construct
QQDYTSLPT

SEQ ID NO: 6817 - protein, 9 aa, synthetic construct
QQDYTSLPT

SEQ ID NO: 6818 - protein, 9 aa, synthetic construct
ALWYSNHLV

SEQ ID NO: 6819 - protein, 9 aa, synthetic construct
QQSHEDPRT

SEQ ID NO: 6820 - protein, 9 aa, synthetic construct
FQGSGYPLT

SEQ ID NO: 6821 - protein, 9 aa, synthetic construct
LQSDNMPLM

SEQ ID NO: 6822 - protein, 9 aa, synthetic construct
QHFWGTPYT

SEQ ID NO: 6823 - protein, 9 aa, synthetic construct
QQRSTYPTF

SEQ ID NO: 6824 - protein, 9 aa, synthetic construct
LQSDNMPLT

SEQ ID NO: 6825 - protein, 9 aa, synthetic construct
LQSDNMPLT

SEQ ID NO: 6826 - protein, 9 aa, synthetic construct
QQGNTLPFT

SEQ ID NO: 6827 - protein, 9 aa, synthetic construct
QQGNTLPFT

SEQ ID NO: 6828 - protein, 9 aa, synthetic construct
QQYSKLPYT

SEQ ID NO: 6829 - protein, 9 aa, synthetic construct
QQYSKLPYT

SEQ ID NO: 6830 - protein, 9 aa, synthetic construct
QNGHSFPWT

SEQ ID NO: 6831 - protein, 9 aa, synthetic construct
QNGHSFPWT

SEQ ID NO: 6832 - protein, 9 aa, synthetic construct
LQFYEFPYT

SEQ ID NO: 6833 - protein, 9 aa, synthetic construct
LQFYEFPYT

SEQ ID NO: 6834 - protein, 9 aa, synthetic construct
LQFYEFPYT

SEQ ID NO: 6835 - protein, 9 aa, synthetic construct
QHFWSTPWT

SEQ ID NO: 6836 - protein, 9 aa, synthetic construct
QHFWSTPWT

SEQ ID NO: 6837 - protein, 9 aa, synthetic construct
ALWYSTHYV

SEQ ID NO: 6838 - protein, 9 aa, synthetic construct
ALWYSTHYV

SEQ ID NO: 6839 - protein, 9 aa, synthetic construct
LQYASYPWT

SEQ ID NO: 6840 - protein, 9 aa, synthetic construct
LQYASYPWT

SEQ ID NO: 6841 - protein, 9 aa, synthetic construct
QQSNEDPLP

SEQ ID NO: 6842 - protein, 9 aa, synthetic construct
QQGQSYPLT

SEQ ID NO: 6843 - protein, 9 aa, synthetic construct
QQWSSNPLT

SEQ ID NO: 6844 - protein, 9 aa, synthetic construct
QHFWSTPWT

SEQ ID NO: 6845 - protein, 9 aa, synthetic construct
QHHYGTPFT

SEQ ID NO: 6846 - protein, 9 aa, synthetic construct
QQFTSSLTF

SEQ ID NO: 6847 - protein, 9 aa, synthetic construct
TLWYSNHWV

SEQ ID NO: 6848 - protein, 9 aa, synthetic construct
QQYSSYPFT

SEQ ID NO: 6849 - protein, 9 aa, synthetic construct
LQYDEFPPT

SEQ ID NO: 6850 - protein, 9 aa, synthetic construct
QHFWGTPFT

SEQ ID NO: 6851 - protein, 9 aa, synthetic construct
QNGHSFPYT

SEQ ID NO: 6852 - protein, 9 aa, synthetic construct
QNGHSFPYT

SEQ ID NO: 6853 - protein, 9 aa, synthetic construct
QHFWGTPYT

SEQ ID NO: 6854 - protein, 9 aa, synthetic construct
ALWYSNHWV

SEQ ID NO: 6855 - protein, 9 aa, synthetic construct
LQSDNLPLT

SEQ ID NO: 6856 - protein, 9 aa, synthetic construct
QQRSSYPPT

SEQ ID NO: 6857 - protein, 9 aa, synthetic construct
QQWSSNPLT

SEQ ID NO: 6858 - protein, 9 aa, synthetic construct
LQSDNLPLT

SEQ ID NO: 6859 - protein, 9 aa, synthetic construct
HQWSSYPPT

SEQ ID NO: 6860 - protein, 9 aa, synthetic construct
GVGDTIKEQ

SEQ ID NO: 6861 - protein, 9 aa, synthetic construct
FQGSHVPWT

SEQ ID NO: 6862 - protein, 9 aa, synthetic construct
LQYDEFPPT

SEQ ID NO: 6863 - protein, 9 aa, synthetic construct
WQGTHFPWT

SEQ ID NO: 6864 - protein, 9 aa, synthetic construct
HQWSSYPPT

SEQ ID NO: 6865 - protein, 9 aa, synthetic construct
FQGSHVPPT

SEQ ID NO: 6866 - protein, 9 aa, synthetic construct
QHFWGTPWT

SEQ ID NO: 6867 - protein, 9 aa, synthetic construct
HQWSSYPPT

SEQ ID NO: 6868 - protein, 9 aa, synthetic construct
QQWSTYPPI

SEQ ID NO: 6869 - protein, 9 aa, synthetic construct
QQWSSYPFT

SEQ ID NO: 6870 - protein, 9 aa, synthetic construct
QQWSSNPYT

SEQ ID NO: 6871 - protein, 9 aa, synthetic construct
QHFWGTPWT

SEQ ID NO: 6872 - protein, 9 aa, synthetic construct
QQHYSTPWT

SEQ ID NO: 6873 - protein, 9 aa, synthetic construct
WQGTHFPWT

SEQ ID NO: 6874 - protein, 9 aa, synthetic construct
FQGSHVPPT

SEQ ID NO: 6875 - protein, 9 aa, synthetic construct
LQSDNMPLT

SEQ ID NO: 6876 - protein, 9 aa, synthetic construct
LQYDNLYMY

SEQ ID NO: 6877 - protein, 9 aa, synthetic construct
QQGQSYPYT

SEQ ID NO: 6878 - protein, 9 aa, synthetic construct
QQWSSNPPT

SEQ ID NO: 6879 - protein, 9 aa, synthetic construct
WQGTHFPWT

SEQ ID NO: 6880 - protein, 9 aa, synthetic construct
QQWSSYPFT

SEQ ID NO: 6881 - protein, 9 aa, synthetic construct
HQWSSYPPT

SEQ ID NO: 6882 - protein, 9 aa, synthetic construct
QQFTSSPST

SEQ ID NO: 6883 - protein, 9 aa, synthetic construct
QQFTSSPST

SEQ ID NO: 6884 - protein, 9 aa, synthetic construct
LQSDNLPLT

SEQ ID NO: 6885 - protein, 9 aa, synthetic construct
LQSDNLPLT

SEQ ID NO: 6886 - protein, 9 aa, synthetic construct
QQSNEDPWT

SEQ ID NO: 6887 - protein, 9 aa, synthetic construct
QQSNSWPFT

SEQ ID NO: 6888 - protein, 9 aa, synthetic construct
HQWSSYPPT

SEQ ID NO: 6889 - protein, 9 aa, synthetic construct
LQSDNMPLT

SEQ ID NO: 6890 - protein, 9 aa, synthetic construct
WQGTHFPWT

SEQ ID NO: 6891 - protein, 9 aa, synthetic construct
LQYDNLRTF

SEQ ID NO: 6892 - protein, 9 aa, synthetic construct
VLWYSNHLV

SEQ ID NO: 6893 - protein, 9 aa, synthetic construct
GQSYSYPPT

SEQ ID NO: 6894 - protein, 9 aa, synthetic construct
QQSNEDPRT

SEQ ID NO: 6895 - protein, 9 aa, synthetic construct
QQYYSYRTF

SEQ ID NO: 6896 - protein, 9 aa, synthetic construct
WQGTHFPFT

SEQ ID NO: 6897 - protein, 9 aa, synthetic construct
QQSNEDPFT

SEQ ID NO: 6898 - protein, 9 aa, synthetic construct
GVGDTIKEQ

SEQ ID NO: 6899 - protein, 13 aa, synthetic construct
GVGDTIKEQFVYV

SEQ ID NO: 6900 - protein, 9 aa, synthetic construct
QQWSSNPLT

SEQ ID NO: 6901 - protein, 9 aa, synthetic construct
QQWSSNPLT

SEQ ID NO: 6902 - protein, 9 aa, synthetic construct
LQFYEFPLT

SEQ ID NO: 6903 - protein, 9 aa, synthetic construct
QQSKEVPPT

SEQ ID NO: 6904 - protein, 9 aa, synthetic construct
QNGHSFPLT

SEQ ID NO: 6905 - protein, 9 aa, synthetic construct
FQGSHVPLT

SEQ ID NO: 6906 - protein, 9 aa, synthetic construct
QQWSSNPLT

SEQ ID NO: 6907 - protein, 9 aa, synthetic construct
AQFYSYPYT

SEQ ID NO: 6908 - protein, 9 aa, synthetic construct
GVGDTIKEQ

SEQ ID NO: 6909 - protein, 9 aa, synthetic construct
QHSWEIPLT

SEQ ID NO: 6910 - protein, 9 aa, synthetic construct
QQWSSNPLT

SEQ ID NO: 6911 - protein, 9 aa, synthetic construct
QQYWSTPLT

SEQ ID NO: 6912 - protein, 9 aa, synthetic construct
QHHYGTPYT

SEQ ID NO: 6913 - protein, 9 aa, synthetic construct
QHHYGTPPT

SEQ ID NO: 6914 - protein, 9 aa, synthetic construct
QQWSSNPPT

SEQ ID NO: 6915 - protein, 9 aa, synthetic construct
QQSKEVPPT

SEQ ID NO: 6916 - protein, 9 aa, synthetic construct
AQFYSYPYT

SEQ ID NO: 6917 - protein, 9 aa, synthetic construct
ALWYSTHYV

SEQ ID NO: 6918 - protein, 9 aa, synthetic construct
HQRSSYPTF

SEQ ID NO: 6919-7173 - skipped (255 entries)

SEQ ID NO: 7174 - protein, 11 aa, synthetic construct
KASQDINSYLS

SEQ ID NO: 7175 - protein, 11 aa, synthetic construct
KASQDINGYLS

SEQ ID NO: 7176 - protein, 11 aa, synthetic construct
KASQDINSYLS

SEQ ID NO: 7177 - protein, 11 aa, synthetic construct
KASQDINGYLS

SEQ ID NO: 7178 - protein, 11 aa, synthetic construct
KASQDINSYLS

SEQ ID NO: 7179 - protein, 11 aa, synthetic construct
KASQDINSYLS

SEQ ID NO: 7180 - protein, 11 aa, synthetic construct
KASQDINSYLS

SEQ ID NO: 7181 - protein, 11 aa, synthetic construct
KASQDINSYLS

SEQ ID NO: 7182 - protein, 11 aa, synthetic construct
KASQDINSYLS

SEQ ID NO: 7183 - protein, 11 aa, synthetic construct
KASQDINSYLS

SEQ ID NO: 7184 - protein, 11 aa, synthetic construct
KASQDINSYLS

SEQ ID NO: 7185 - protein, 11 aa, synthetic construct
KASQDINSYLS

SEQ ID NO: 7186 - protein, 11 aa, synthetic construct
KASQDINSYLS

SEQ ID NO: 7187 - protein, 11 aa, synthetic construct
KASQDINSYLS

SEQ ID NO: 7188 - protein, 11 aa, synthetic construct
KASQDINSYLS

SEQ ID NO: 7189 - protein, 11 aa, synthetic construct
KASQDINSYLN

SEQ ID NO: 7190 - protein, 11 aa, synthetic construct
KASQDINSYLS

SEQ ID NO: 7191 - protein, 11 aa, synthetic construct
KASQDINSYLS

SEQ ID NO: 7192 - protein, 11 aa, synthetic construct
KASQDINSYLS

SEQ ID NO: 7193 - protein, 11 aa, synthetic construct
RASDNIYSNLA

SEQ ID NO: 7194 - protein, 11 aa, synthetic construct
RASENIYSNLA

SEQ ID NO: 7195 - protein, 11 aa, synthetic construct
KASQDINSYLS

SEQ ID NO: 7196 - protein, 11 aa, synthetic construct
KASENVVTYVS

SEQ ID NO: 7197 - protein, 11 aa, synthetic construct
KASENVVTYVS

SEQ ID NO: 7198 - protein, 11 aa, synthetic construct
KASENVVTYVS

SEQ ID NO: 7199 - protein, 11 aa, synthetic construct
KASENVVTYVS

SEQ ID NO: 7200 - protein, 10 aa, synthetic construct
SASSSVSYMH

SEQ ID NO: 7201 - protein, 10 aa, synthetic construct
SASSSVSYMH

SEQ ID NO: 7202 - protein, 15 aa, synthetic construct
KASQSVDYDGDSYMN

SEQ ID NO: 7203 - protein, 15 aa, synthetic construct
KASQSVDYDGDSYMN

SEQ ID NO: 7204 - protein, 15 aa, synthetic construct
KASQSVDYDGDSYMN

SEQ ID NO: 7205 - protein, 15 aa, synthetic construct
KASQSVDYDGDSYMN

SEQ ID NO: 7206 - protein, 11 aa, synthetic construct
QATQDIVKNLN

SEQ ID NO: 7207 - protein, 15 aa, synthetic construct
KASQSVDYDGDSYMN

SEQ ID NO: 7208 - protein, 15 aa, synthetic construct
KASQSVDYDGDSYMN

SEQ ID NO: 7209 - protein, 15 aa, synthetic construct
KASQSVDYDGDSYMN

SEQ ID NO: 7210 - protein, 15 aa, synthetic construct
KASQSVDYDGDSYMN

SEQ ID NO: 7211 - protein, 15 aa, synthetic construct
KASQSVDYDGDSYMN

SEQ ID NO: 7212 - protein, 15 aa, synthetic construct
KASQSVDYDGDSYMN

SEQ ID NO: 7213 - protein, 15 aa, synthetic construct
RASQSVSTSSYSYMH

SEQ ID NO: 7214 - protein, 15 aa, synthetic construct
RASQSVSTSSYSYMH

SEQ ID NO: 7215 - protein, 15 aa, synthetic construct
RASQSVSTSSYSYMH

SEQ ID NO: 7216 - protein, 14 aa, synthetic construct
RSSTGAVTTSNYAN

SEQ ID NO: 7217 - protein, 14 aa, synthetic construct
RSSTGAVTTSNYAN

SEQ ID NO: 7218 - protein, 14 aa, synthetic construct
RSSTGAVTTSNYAN

SEQ ID NO: 7219 - protein, 15 aa, synthetic construct
KASQSVDYDGDSYMN

SEQ ID NO: 7220 - protein, 14 aa, synthetic construct
RSSTGAVTTSNYAN

SEQ ID NO: 7221 - protein, 17 aa, synthetic construct
KSSQSLLNSSNQKNYLA

SEQ ID NO: 7222 - protein, 11 aa, synthetic construct
RASQDISNYLN

SEQ ID NO: 7223 - protein, 11 aa, synthetic construct
QATQDIVKNLN

SEQ ID NO: 7224 - protein, 15 aa, synthetic construct
KASQSVDYDGDSYMN

SEQ ID NO: 7225 - protein, 11 aa, synthetic construct
QATQDIVKNLN

SEQ ID NO: 7226 - protein, 12 aa, synthetic construct
TLSSQHSTYTIE

SEQ ID NO: 7227 - protein, 11 aa, synthetic construct
RASENIYSYLA

SEQ ID NO: 7228 - protein, 10 aa, synthetic construct
SASSSVSYMH

SEQ ID NO: 7229 - protein, 11 aa, synthetic construct
KASQDINSYLS

SEQ ID NO: 7230 - protein, 11 aa, synthetic construct
RASQDIHGYLN

SEQ ID NO: 7231 - protein, 11 aa, synthetic construct
KASQDVGTAVA

SEQ ID NO: 7232 - protein, 11 aa, synthetic construct
KASQSVSNDVA

SEQ ID NO: 7233 - protein, 11 aa, synthetic construct
ITSTDIDDDMN

SEQ ID NO: 7234 - protein, 11 aa, synthetic construct
RASQDISNYLN

SEQ ID NO: 7235 - protein, 11 aa, synthetic construct
SASQGISNYLN

SEQ ID NO: 7236 - protein, 11 aa, synthetic construct
RASQSISDYLH

SEQ ID NO: 7237 - protein, 11 aa, synthetic construct
QATQDIVKNLN

SEQ ID NO: 7238 - protein, 11 aa, synthetic construct
QATQDIVKNLN

SEQ ID NO: 7239 - protein, 11 aa, synthetic construct
RASGNIHNYLA

SEQ ID NO: 7240 - protein, 14 aa, synthetic construct
RSSTGAVTTSNYAN

SEQ ID NO: 7241 - protein, 11 aa, synthetic construct
RASQEISGYLS

SEQ ID NO: 7242 - protein, 11 aa, synthetic construct
RASQSISDYLH

SEQ ID NO: 7243 - protein, 12 aa, synthetic construct
TLSSQHSTYTIE

SEQ ID NO: 7244 - protein, 10 aa, synthetic construct
RASSSVNYMY

SEQ ID NO: 7245 - protein, 11 aa, synthetic construct
ITNTDIDDDMN

SEQ ID NO: 7246 - protein, 12 aa, synthetic construct
TLSSQHSTYTIE

SEQ ID NO: 7247 - protein, 12 aa, synthetic construct
TLSSQHSTYTIE

SEQ ID NO: 7248 - protein, 10 aa, synthetic construct
SASSSVSYMH

SEQ ID NO: 7249 - protein, 12 aa, synthetic construct
TLSSQHSTYTIE

SEQ ID NO: 7250-7504 - skipped (255 entries)

SEQ ID NO: 7505 - protein, 12 aa, synthetic construct
KTLIYRANRLVD

SEQ ID NO: 7506 - protein, 12 aa, synthetic construct
KTLIYRANRLVD

SEQ ID NO: 7507 - protein, 12 aa, synthetic construct
KTLIYRANRLVD

SEQ ID NO: 7508 - protein, 12 aa, synthetic construct
KTLIYRANRLVD

SEQ ID NO: 7509 - protein, 12 aa, synthetic construct
KTLIYRANRLVD

SEQ ID NO: 7510 - protein, 12 aa, synthetic construct
KTLIYRANRLVD

SEQ ID NO: 7511 - protein, 12 aa, synthetic construct
KTLIYRANRLVD

SEQ ID NO: 7512 - protein, 12 aa, synthetic construct
KTLIYRANRLVD

SEQ ID NO: 7513 - protein, 12 aa, synthetic construct
KTLIYRANRLVD

SEQ ID NO: 7514 - protein, 12 aa, synthetic construct
KTLIYRANRLVD

SEQ ID NO: 7515 - protein, 12 aa, synthetic construct
KTLIYRANRLVD

SEQ ID NO: 7516 - protein, 12 aa, synthetic construct
KTLIYRANRLVD

SEQ ID NO: 7517 - protein, 12 aa, synthetic construct
QTLLYRANRLVD

SEQ ID NO: 7518 - protein, 12 aa, synthetic construct
KTLIYRANRLVD

SEQ ID NO: 7519 - protein, 12 aa, synthetic construct
KTLIYRANRLVD

SEQ ID NO: 7520 - protein, 12 aa, synthetic construct
KTLIYRANRLVD

SEQ ID NO: 7521 - protein, 12 aa, synthetic construct
KTLIYRANRLVD

SEQ ID NO: 7522 - protein, 12 aa, synthetic construct
KTLIYRAKRLVD

SEQ ID NO: 7523 - protein, 12 aa, synthetic construct
KTLIYRANRLVD

SEQ ID NO: 7524 - protein, 12 aa, synthetic construct
QTLLYRANRLVD

SEQ ID NO: 7525 - protein, 12 aa, synthetic construct
KTLIYRAKRLVD

SEQ ID NO: 7526 - protein, 12 aa, synthetic construct
QTLLYRANRLVD

SEQ ID NO: 7527 - protein, 12 aa, synthetic construct
KTLIYRAKRLVD

SEQ ID NO: 7528 - protein, 12 aa, synthetic construct
KTLIYRANRLVD

SEQ ID NO: 7529 - protein, 12 aa, synthetic construct
KTLIYRANRLVD

SEQ ID NO: 7530 - protein, 12 aa, synthetic construct
KTLIYRANRLVD

SEQ ID NO: 7531 - protein, 12 aa, synthetic construct
KTLIYRANRLVD

SEQ ID NO: 7532 - protein, 12 aa, synthetic construct
KTLIYRANRLVD

SEQ ID NO: 7533 - protein, 12 aa, synthetic construct
KTLIYRANRLVD

SEQ ID NO: 7534 - protein, 12 aa, synthetic construct
KTLIYRANRLVD

SEQ ID NO: 7535 - protein, 12 aa, synthetic construct
KTLIYRANRLVD

SEQ ID NO: 7536 - protein, 12 aa, synthetic construct
KTLIYRANRLVD

SEQ ID NO: 7537 - protein, 12 aa, synthetic construct
KTLIYRANRLVD

SEQ ID NO: 7538 - protein, 12 aa, synthetic construct
KTLIYRANRLVD

SEQ ID NO: 7539 - protein, 12 aa, synthetic construct
KTLIYRANRLVD

SEQ ID NO: 7540 - protein, 12 aa, synthetic construct
KTLIYRANRLVD

SEQ ID NO: 7541 - protein, 12 aa, synthetic construct
KTLIYRANRLVD

SEQ ID NO: 7542 - protein, 12 aa, synthetic construct
QLLVFAATYLAD

SEQ ID NO: 7543 - protein, 12 aa, synthetic construct
QLLVYAATNLAD

SEQ ID NO: 7544 - protein, 12 aa, synthetic construct
QVLVYAATNLAD

SEQ ID NO: 7545 - protein, 12 aa, synthetic construct
RLLVYAATNLAD

SEQ ID NO: 7546 - protein, 12 aa, synthetic construct
QLLVYAATNLAD

SEQ ID NO: 7547 - protein, 12 aa, synthetic construct
QVLVYAATNVAD

SEQ ID NO: 7548 - protein, 12 aa, synthetic construct
QLLVYAATNLAD

SEQ ID NO: 7549 - protein, 12 aa, synthetic construct
RLLVYAATNLAD

SEQ ID NO: 7550 - protein, 12 aa, synthetic construct
QLLVYAATNLAD

SEQ ID NO: 7551 - protein, 12 aa, synthetic construct
QLLVFAATYLAD

SEQ ID NO: 7552 - protein, 12 aa, synthetic construct
QLLVYAATNLAD

SEQ ID NO: 7553 - protein, 12 aa, synthetic construct
QLLVYAATNLAD

SEQ ID NO: 7554 - protein, 12 aa, synthetic construct
QLLVFAATYLAD

SEQ ID NO: 7555 - protein, 12 aa, synthetic construct
KTLIYRANRLVD

SEQ ID NO: 7556 - protein, 12 aa, synthetic construct
KLLIYGASNRYT

SEQ ID NO: 7557 - protein, 12 aa, synthetic construct
KLLIYGASNRYT

SEQ ID NO: 7558 - protein, 12 aa, synthetic construct
KLLIYGASNRYT

SEQ ID NO: 7559 - protein, 12 aa, synthetic construct
KLLIYGASNRYT

SEQ ID NO: 7560 - protein, 12 aa, synthetic construct
KLLIYGASNRYT

SEQ ID NO: 7561 - protein, 12 aa, synthetic construct
KLLIYGASNRYT

SEQ ID NO: 7562 - protein, 12 aa, synthetic construct
KTLIYRANRLVD

SEQ ID NO: 7563 - protein, 12 aa, synthetic construct
KLLIYGASNRYT

SEQ ID NO: 7564 - protein, 12 aa, synthetic construct
KLLIYGASNRYT

SEQ ID NO: 7565 - protein, 12 aa, synthetic construct
KLLIYGASNRYT

SEQ ID NO: 7566 - protein, 12 aa, synthetic construct
KLLIYGASNRYT

SEQ ID NO: 7567 - protein, 12 aa, synthetic construct
KRWIYDTSKLAS

SEQ ID NO: 7568 - protein, 12 aa, synthetic construct
KRWIYDTSKLAS

SEQ ID NO: 7569 - protein, 12 aa, synthetic construct
KRWIYDTSKLAS

SEQ ID NO: 7570 - protein, 12 aa, synthetic construct
KRWIYDTSKLAS

SEQ ID NO: 7571 - protein, 12 aa, synthetic construct
KRWIYDTSKLAS

SEQ ID NO: 7572 - protein, 12 aa, synthetic construct
KRWIYDTSKLAS

SEQ ID NO: 7573 - protein, 12 aa, synthetic construct
KRWIYDTSKLAS

SEQ ID NO: 7574 - protein, 12 aa, synthetic construct
KLLIYAASNLES

SEQ ID NO: 7575 - protein, 12 aa, synthetic construct
KLLIYAASNLES

SEQ ID NO: 7576 - protein, 12 aa, synthetic construct
QLLIYAASNLQS

SEQ ID NO: 7577 - protein, 12 aa, synthetic construct
KLLIYAASNLES

SEQ ID NO: 7578 - protein, 12 aa, synthetic construct
KLLIYAASNLES

SEQ ID NO: 7579 - protein, 12 aa, synthetic construct
KLLIYAASNLES

SEQ ID NO: 7580 - protein, 12 aa, synthetic construct
KLLIYAASNLES

SEQ ID NO: 7581 - protein, 12 aa, synthetic construct
QLLIYAASNLQS

SEQ ID NO: 7582 - protein, 12 aa, synthetic construct
KLLIYAASNLES

SEQ ID NO: 7583 - protein, 12 aa, synthetic construct
SLLIHYTSTLQP

SEQ ID NO: 7584 - protein, 12 aa, synthetic construct
RLLIHYTSTLQP

SEQ ID NO: 7585 - protein, 12 aa, synthetic construct
RLLIHYTSTLQP

SEQ ID NO: 7586 - protein, 12 aa, synthetic construct
SFLIYYATELAE

SEQ ID NO: 7587 - protein, 12 aa, synthetic construct
SFLIYYATELAE

SEQ ID NO: 7588 - protein, 12 aa, synthetic construct
SFLIYYATELAE

SEQ ID NO: 7589 - protein, 12 aa, synthetic construct
SFLIYYATELAE

SEQ ID NO: 7590 - protein, 12 aa, synthetic construct
SFLIYYATELAE

SEQ ID NO: 7591 - protein, 12 aa, synthetic construct
KLWIYYTSNLAP

SEQ ID NO: 7592 - protein, 12 aa, synthetic construct
KLWIYYTSNLAP

SEQ ID NO: 7593 - protein, 12 aa, synthetic construct
KLWIYYTSNLAP

SEQ ID NO: 7594 - protein, 12 aa, synthetic construct
KLLIYAASNLES

SEQ ID NO: 7595 - protein, 12 aa, synthetic construct
KLLIYAASNLES

SEQ ID NO: 7596 - protein, 12 aa, synthetic construct
KLLIYAASNLES

SEQ ID NO: 7597 - protein, 12 aa, synthetic construct
KLLIYAASNLES

SEQ ID NO: 7598 - protein, 12 aa, synthetic construct
KLLIYAASNLES

SEQ ID NO: 7599 - protein, 12 aa, synthetic construct
KLLIYAASNLES

SEQ ID NO: 7600 - protein, 12 aa, synthetic construct
KLLIYAASNLES

SEQ ID NO: 7601 - protein, 12 aa, synthetic construct
KLLIYAASNLES

SEQ ID NO: 7602 - protein, 12 aa, synthetic construct
KLLIYAASNLES

SEQ ID NO: 7603 - protein, 12 aa, synthetic construct
KLLIKYASNLES

SEQ ID NO: 7604 - protein, 12 aa, synthetic construct
KLLIKYASNLES

SEQ ID NO: 7605 - protein, 12 aa, synthetic construct
KLLIKYASNLES

SEQ ID NO: 7606 - protein, 12 aa, synthetic construct
KLLIKYASNLES

SEQ ID NO: 7607 - protein, 12 aa, synthetic construct
KLLIKYASNLES

SEQ ID NO: 7608 - protein, 12 aa, synthetic construct
KLLIKYASNLES

SEQ ID NO: 7609 - protein, 12 aa, synthetic construct
KLLIYSTSRLHS

SEQ ID NO: 7610 - protein, 12 aa, synthetic construct
KLLIYSTSRLHS

SEQ ID NO: 7611 - protein, 12 aa, synthetic construct
KLLIYSTSRLHS

SEQ ID NO: 7612 - protein, 12 aa, synthetic construct
TGLIGGTSNRAP

SEQ ID NO: 7613 - protein, 12 aa, synthetic construct
TGLIGGTSNRAP

SEQ ID NO: 7614 - protein, 12 aa, synthetic construct
TGLIGGTSNRAP

SEQ ID NO: 7615 - protein, 12 aa, synthetic construct
TGLIGGTSNRAP

SEQ ID NO: 7616 - protein, 12 aa, synthetic construct
TGLIGGTSNRAP

SEQ ID NO: 7617 - protein, 12 aa, synthetic construct
TGLIGGTSNRAP

SEQ ID NO: 7618 - protein, 12 aa, synthetic construct
QLLVYAATNLAD

SEQ ID NO: 7619 - protein, 12 aa, synthetic construct
KLLISEGNTLRP

SEQ ID NO: 7620 - protein, 12 aa, synthetic construct
KLLISEGNTLRP

SEQ ID NO: 7621 - protein, 12 aa, synthetic construct
TGLIGGTSNRAP

SEQ ID NO: 7622 - protein, 12 aa, synthetic construct
KLLIYAASNLES

SEQ ID NO: 7623 - protein, 12 aa, synthetic construct
KLLIYAASNLES

SEQ ID NO: 7624 - protein, 12 aa, synthetic construct
KLLIYWASTRES

SEQ ID NO: 7625 - protein, 12 aa, synthetic construct
TGLIGGTSNRAP

SEQ ID NO: 7626 - protein, 12 aa, synthetic construct
TGLIGGTSNRAP

SEQ ID NO: 7627 - protein, 12 aa, synthetic construct
TGLIGGTNNRAP

SEQ ID NO: 7628 - protein, 12 aa, synthetic construct
KLLIYAASNLES

SEQ ID NO: 7629 - protein, 12 aa, synthetic construct
TGLIGGTNNRAP

SEQ ID NO: 7630 - protein, 12 aa, synthetic construct
QLLIYNANSLED

SEQ ID NO: 7631 - protein, 12 aa, synthetic construct
KLLVYFASTRES

SEQ ID NO: 7632 - protein, 12 aa, synthetic construct
KLLVYFASTRES

SEQ ID NO: 7633 - protein, 12 aa, synthetic construct
KLLIYYTSRLHS

SEQ ID NO: 7634 - protein, 12 aa, synthetic construct
KLLIYYTSRLHS

SEQ ID NO: 7635 - protein, 12 aa, synthetic construct
KLLIYYTSRLHS

SEQ ID NO: 7636 - protein, 12 aa, synthetic construct
QLLVYAATNLAD

SEQ ID NO: 7637 - protein, 12 aa, synthetic construct
SFLIYYATELAE

SEQ ID NO: 7638 - protein, 12 aa, synthetic construct
SFLIYYATELAE

SEQ ID NO: 7639 - protein, 12 aa, synthetic construct
RLLIYDTSNLAS

SEQ ID NO: 7640 - protein, 12 aa, synthetic construct
KLLIYAASNLES

SEQ ID NO: 7641 - protein, 12 aa, synthetic construct
KLLIYAASNLES

SEQ ID NO: 7642 - protein, 12 aa, synthetic construct
TGLIGGTNNRAP

SEQ ID NO: 7643 - protein, 12 aa, synthetic construct
SFLIYYATELAE

SEQ ID NO: 7644 - protein, 12 aa, synthetic construct
SFLIYYATELAE

SEQ ID NO: 7645 - protein, 16 aa, synthetic construct
KYVMELKKDGSHSTGD

SEQ ID NO: 7646 - protein, 12 aa, synthetic construct
KLLIYAASNLES

SEQ ID NO: 7647 - protein, 12 aa, synthetic construct
KRLIYATSSLDS

SEQ ID NO: 7648 - protein, 12 aa, synthetic construct
QLLVYNAKNLAD

SEQ ID NO: 7649 - protein, 12 aa, synthetic construct
KLWIYSTSNLAS

SEQ ID NO: 7650 - protein, 12 aa, synthetic construct
KLWIYSTSNLAS

SEQ ID NO: 7651 - protein, 12 aa, synthetic construct
KTLIYRANRLVD

SEQ ID NO: 7652 - protein, 12 aa, synthetic construct
KTLIYRANRLVD

SEQ ID NO: 7653 - protein, 12 aa, synthetic construct
KHLIYETSNLDS

SEQ ID NO: 7654 - protein, 12 aa, synthetic construct
KHLIYETSNLDS

SEQ ID NO: 7655 - protein, 12 aa, synthetic construct
KLLIYWASTRHT

SEQ ID NO: 7656 - protein, 12 aa, synthetic construct
KLLIYWASTRHT

SEQ ID NO: 7657 - protein, 12 aa, synthetic construct
KLLIYYASNRYT

SEQ ID NO: 7658 - protein, 12 aa, synthetic construct
KLLIYYASNRYT

SEQ ID NO: 7659 - protein, 12 aa, synthetic construct
TGLIGGTNNRAP

SEQ ID NO: 7660 - protein, 12 aa, synthetic construct
KLLIYVASNLES

SEQ ID NO: 7661 - protein, 12 aa, synthetic construct
KLWIYDTSKLAS

SEQ ID NO: 7662 - protein, 12 aa, synthetic construct
KLLISEGNTLRP

SEQ ID NO: 7663 - protein, 12 aa, synthetic construct
QLLVYAATNLAD

SEQ ID NO: 7664 - protein, 12 aa, synthetic construct
KLWIYSTSNLAS

SEQ ID NO: 7665 - protein, 12 aa, synthetic construct
KLLISEGNTLRP

SEQ ID NO: 7666 - protein, 12 aa, synthetic construct
KLLISEGNTLRP

SEQ ID NO: 7667 - protein, 12 aa, synthetic construct
KLLIYYTSRLHS

SEQ ID NO: 7668 - protein, 12 aa, synthetic construct
KLLIYYTSRLHS

SEQ ID NO: 7669 - protein, 12 aa, synthetic construct
KLLIYYTSSLHS

SEQ ID NO: 7670 - protein, 12 aa, synthetic construct
KLLIYYTSSLHS

SEQ ID NO: 7671 - protein, 12 aa, synthetic construct
RLLIKYASQSIS

SEQ ID NO: 7672 - protein, 12 aa, synthetic construct
RLLIKYASQSIS

SEQ ID NO: 7673 - protein, 12 aa, synthetic construct
SFLIYYATELAE

SEQ ID NO: 7674 - protein, 12 aa, synthetic construct
SFLIYYATELAE

SEQ ID NO: 7675 - protein, 12 aa, synthetic construct
SFLIYYATELAE

SEQ ID NO: 7676 - protein, 12 aa, synthetic construct
QLLVYNAKTLAD

SEQ ID NO: 7677 - protein, 12 aa, synthetic construct
QLLVYNAKTLAD

SEQ ID NO: 7678 - protein, 12 aa, synthetic construct
TGLIGGTSYRAP

SEQ ID NO: 7679 - protein, 12 aa, synthetic construct
TGLIGGTSYRAP

SEQ ID NO: 7680 - protein, 12 aa, synthetic construct
KRLIYAASTLDS

SEQ ID NO: 7681 - protein, 12 aa, synthetic construct
KRLIYAASTLDS

SEQ ID NO: 7682 - protein, 12 aa, synthetic construct
KLLIYAASNLES

SEQ ID NO: 7683 - protein, 12 aa, synthetic construct
KLLIYKASNLHT

SEQ ID NO: 7684 - protein, 12 aa, synthetic construct
KRWIYDTSKLAS

SEQ ID NO: 7685 - protein, 12 aa, synthetic construct
QLLVYNAKTLAD

SEQ ID NO: 7686 - protein, 12 aa, synthetic construct
QLLVYNAKTLAE

SEQ ID NO: 7687 - protein, 12 aa, synthetic construct
KLWIYYTSNLAP

SEQ ID NO: 7688 - protein, 12 aa, synthetic construct
TGLIGSTNNRAP

SEQ ID NO: 7689 - protein, 12 aa, synthetic construct
KLLIYWASTRHT

SEQ ID NO: 7690 - protein, 12 aa, synthetic construct
KTLIYRANRLVD

SEQ ID NO: 7691 - protein, 12 aa, synthetic construct
QLLVYAATNLAD

SEQ ID NO: 7692 - protein, 12 aa, synthetic construct
RLLIKYASQSIS

SEQ ID NO: 7693 - protein, 12 aa, synthetic construct
RLLIKYASQSIS

SEQ ID NO: 7694 - protein, 12 aa, synthetic construct
QLLVYAATNLAD

SEQ ID NO: 7695 - protein, 12 aa, synthetic construct
TGLIGGTNNRAP

SEQ ID NO: 7696 - protein, 12 aa, synthetic construct
KLLISEGNTLRP

SEQ ID NO: 7697 - protein, 12 aa, synthetic construct
KLWIYSTSNLAS

SEQ ID NO: 7698 - protein, 12 aa, synthetic construct
KRWIYDTSKLAS

SEQ ID NO: 7699 - protein, 12 aa, synthetic construct
KLLISEGNSLRP

SEQ ID NO: 7700 - protein, 12 aa, synthetic construct
KLWIYSTSNLAS

SEQ ID NO: 7701 - protein, 16 aa, synthetic construct
KYVMELKKDGSHSTGD

SEQ ID NO: 7702 - protein, 12 aa, synthetic construct
KLLIYKVSNRFS

SEQ ID NO: 7703 - protein, 12 aa, synthetic construct
KTLIYRANRLVD

SEQ ID NO: 7704 - protein, 12 aa, synthetic construct
KRLIYLVSKLDS

SEQ ID NO: 7705 - protein, 12 aa, synthetic construct
KLWIYSTSNLAS

SEQ ID NO: 7706 - protein, 12 aa, synthetic construct
KLLIYKVSNRFS

SEQ ID NO: 7707 - protein, 12 aa, synthetic construct
QLLVYAATNLAD

SEQ ID NO: 7708 - protein, 12 aa, synthetic construct
KLWIYSTSNLAS

SEQ ID NO: 7709 - protein, 12 aa, synthetic construct
RLLIYDTSNLAS

SEQ ID NO: 7710 - protein, 12 aa, synthetic construct
RLLIYDTSNLAS

SEQ ID NO: 7711 - protein, 12 aa, synthetic construct
KPWIYATSNLAS

SEQ ID NO: 7712 - protein, 12 aa, synthetic construct
QLLVYAATNLAD

SEQ ID NO: 7713 - protein, 12 aa, synthetic construct
KLLIYWASTRHT

SEQ ID NO: 7714 - protein, 12 aa, synthetic construct
KRLIYLVSKLDS

SEQ ID NO: 7715 - protein, 12 aa, synthetic construct
KFLIYKVSNRFS

SEQ ID NO: 7716 - protein, 12 aa, synthetic construct
KLLISEGNTLRP

SEQ ID NO: 7717 - protein, 12 aa, synthetic construct
RLLIHYTSTLQP

SEQ ID NO: 7718 - protein, 12 aa, synthetic construct
KLLIYKASNLHT

SEQ ID NO: 7719 - protein, 12 aa, synthetic construct
KPWIYLTSNLAS

SEQ ID NO: 7720 - protein, 12 aa, synthetic construct
KRLIYLVSKLDS

SEQ ID NO: 7721 - protein, 12 aa, synthetic construct
RLLIYDTSNLAS

SEQ ID NO: 7722 - protein, 12 aa, synthetic construct
KLWIYSTSNLAS

SEQ ID NO: 7723 - protein, 12 aa, synthetic construct
KLWIYYTSNLAP

SEQ ID NO: 7724 - protein, 12 aa, synthetic construct
KLWIYYTSNLAP

SEQ ID NO: 7725 - protein, 12 aa, synthetic construct
KLLISEGNTLRP

SEQ ID NO: 7726 - protein, 12 aa, synthetic construct
KLLISEGNTLRP

SEQ ID NO: 7727 - protein, 12 aa, synthetic construct
KLLIYAASNLES

SEQ ID NO: 7728 - protein, 12 aa, synthetic construct
RLLIKYASQSIS

SEQ ID NO: 7729 - protein, 12 aa, synthetic construct
KLWIYSTSNLAS

SEQ ID NO: 7730 - protein, 12 aa, synthetic construct
KLLISEGNTLRP

SEQ ID NO: 7731 - protein, 12 aa, synthetic construct
KRLIYLVSKLDS

SEQ ID NO: 7732 - protein, 12 aa, synthetic construct
RLLIHYTSTLQP

SEQ ID NO: 7733 - protein, 12 aa, synthetic construct
TGLIVGTNNRAP

SEQ ID NO: 7734 - protein, 12 aa, synthetic construct
KLLIYGASNRYT

SEQ ID NO: 7735 - protein, 12 aa, synthetic construct
KLLIYRASNLES

SEQ ID NO: 7736 - protein, 12 aa, synthetic construct
KLLLYWASTRES

SEQ ID NO: 7737 - protein, 12 aa, synthetic construct
KRLIYLVSKLDS

SEQ ID NO: 7738 - protein, 12 aa, synthetic construct
KLLIYAASNLES

SEQ ID NO: 7739 - protein, 16 aa, synthetic construct
KYVMELKKDGSHSTGD

SEQ ID NO: 7740 - protein, 16 aa, synthetic construct
KYVMELKKDGSHSTGD

SEQ ID NO: 7741 - protein, 12 aa, synthetic construct
KRWIYDTSKLAS

SEQ ID NO: 7742 - protein, 12 aa, synthetic construct
KRWIYDTSKLAS

SEQ ID NO: 7743 - protein, 12 aa, synthetic construct
SFLIYYATELAE

SEQ ID NO: 7744 - protein, 12 aa, synthetic construct
KLLIYAASNQGS

SEQ ID NO: 7745 - protein, 12 aa, synthetic construct
RLLIKYASQSIS

SEQ ID NO: 7746 - protein, 12 aa, synthetic construct
KLLIYKVSNRFS

SEQ ID NO: 7747 - protein, 12 aa, synthetic construct
KRWIYDTSKLAS

SEQ ID NO: 7748 - protein, 12 aa, synthetic construct
KLLIYGASNRYI

SEQ ID NO: 7749 - protein, 16 aa, synthetic construct
KYVMELKKDGSHSTGD

SEQ ID NO: 7750 - protein, 12 aa, synthetic construct
KLLIKYASNLES

SEQ ID NO: 7751 - protein, 12 aa, synthetic construct
KRWIYDTSKLAS

SEQ ID NO: 7752 - protein, 12 aa, synthetic construct
RLLISGATSLET

SEQ ID NO: 7753 - protein, 12 aa, synthetic construct
QLLVYNAKTLAE

SEQ ID NO: 7754 - protein, 12 aa, synthetic construct
QLLVYNAKTLAE

SEQ ID NO: 7755 - protein, 12 aa, synthetic construct
KRWIYDTSKLAS

SEQ ID NO: 7756 - protein, 12 aa, synthetic construct
KLLIYAASNQGS

SEQ ID NO: 7757 - protein, 12 aa, synthetic construct
KLLIYGASNRYI

SEQ ID NO: 7758 - protein, 12 aa, synthetic construct
TGLIGGTSNRAP

SEQ ID NO: 7759 - protein, 12 aa, synthetic construct
KRWIYDTSKLAS

SEQ ID NO: 7760 - skipped

SEQ ID NO: 7761 - protein, 11 aa, synthetic construct
GQSYSYLIHVR

SEQ ID NO: 7762 - protein, 11 aa, synthetic construct
GQSYSYLIHVR

SEQ ID NO: 7763 - protein, 10 aa, synthetic construct
QQWSSNPLYT

SEQ ID NO: 7764 - protein, 11 aa, synthetic construct
QQWSSNPHVHV

SEQ ID NO: 7765 - protein, 10 aa, synthetic construct
QQWSSNPLYT

SEQ ID NO: 7766 - protein, 10 aa, synthetic construct
QQWSSNPLYT

SEQ ID NO: 7767 - protein, 10 aa, synthetic construct
QQWSSNPLYT

SEQ ID NO: 7768 - protein, 8 aa, synthetic construct
QQFTSSHT

SEQ ID NO: 7769 - protein, 8 aa, synthetic construct
QQFTSSHT

SEQ ID NO: 7770 - protein, 8 aa, synthetic construct
QQFTSSHT

SEQ ID NO: 7771 - protein, 8 aa, synthetic construct
ALWYSTHY

SEQ ID NO: 7772 - protein, 10 aa, synthetic construct
QQYYSYPPWT

SEQ ID NO: 7773 - protein, 8 aa, synthetic construct
ALWYSNHL

SEQ ID NO: 7774 - protein, 13 aa, synthetic construct
GVGDTIKEQFVFV

SEQ ID NO: 7775 - protein, 8 aa, synthetic construct
QQRSTYPT

SEQ ID NO: 7776 - protein, 10 aa, synthetic construct
QQSNEDPLPT

SEQ ID NO: 7777 - protein, 8 aa, synthetic construct
QQFTSSLT

SEQ ID NO: 7778 - protein, 13 aa, synthetic construct
GVGDTIKEQFVYV

SEQ ID NO: 7779 - protein, 10 aa, synthetic construct
QQWSTYPPIT

SEQ ID NO: 7780 - protein, 10 aa, synthetic construct
LQYDNLYMYT

SEQ ID NO: 7781 - protein, 8 aa, synthetic construct
LQYDNLRT

SEQ ID NO: 7782 - protein, 8 aa, synthetic construct
QQYYSYRT

SEQ ID NO: 7783 - protein, 13 aa, synthetic construct
GVGDTIKEQFVYV

SEQ ID NO: 7784 - protein, 13 aa, synthetic construct
GVGDTIKEQFVYV

SEQ ID NO: 7785 - protein, 8 aa, synthetic construct
HQRSSYPT

SEQ ID NO: 7786-8065 - skipped (280 entries)

SEQ ID NO: 8066 - protein, 6 aa, synthetic construct
QGISNY

SEQ ID NO: 8067 - protein, 6 aa, synthetic construct
QGISNY

SEQ ID NO: 8068 - protein, 6 aa, synthetic construct
QDISNY

SEQ ID NO: 8069 - protein, 6 aa, synthetic construct
QDISNY

SEQ ID NO: 8070 - protein, 6 aa, synthetic construct
QDISNY

SEQ ID NO: 8071 - protein, 6 aa, synthetic construct
QDISNY

SEQ ID NO: 8072 - protein, 6 aa, synthetic construct
QDISNY

SEQ ID NO: 8073 - protein, 6 aa, synthetic construct
QDISNY

SEQ ID NO: 8074 - protein, 6 aa, synthetic construct
QDISNY

SEQ ID NO: 8075 - protein, 6 aa, synthetic construct
QDISNY

SEQ ID NO: 8076 - protein, 11 aa, synthetic construct
QSIVHSNGNTY

SEQ ID NO: 8077 - protein, 11 aa, synthetic construct
QSIVYSNGNTY

SEQ ID NO: 8078 - protein, 11 aa, synthetic construct
QSIVHSNGNTY

SEQ ID NO: 8079 - protein, 11 aa, synthetic construct
QSIVHSNGDTY

SEQ ID NO: 8080 - protein, 11 aa, synthetic construct
QSLLDSDGKTY

SEQ ID NO: 8081 - protein, 11 aa, synthetic construct
QSLLDSDGKTY

SEQ ID NO: 8082 - protein, 11 aa, synthetic construct
QSLLDSDGKTY

SEQ ID NO: 8083 - protein, 11 aa, synthetic construct
QSLLDSDGKTY

SEQ ID NO: 8084 - protein, 11 aa, synthetic construct
QSLLDSDGKTY

SEQ ID NO: 8085 - protein, 6 aa, synthetic construct
ENIYYS

SEQ ID NO: 8086 - protein, 6 aa, synthetic construct
GNIHNY

SEQ ID NO: 8087 - protein, 6 aa, synthetic construct
GNIHNY

SEQ ID NO: 8088 - protein, 6 aa, synthetic construct
GNIHNY

SEQ ID NO: 8089 - protein, 6 aa, synthetic construct
ENIYSY

SEQ ID NO: 8090 - protein, 6 aa, synthetic construct
ENIYSY

SEQ ID NO: 8091 - protein, 6 aa, synthetic construct
ENIYSY

SEQ ID NO: 8092 - protein, 6 aa, synthetic construct
ENIYSY

SEQ ID NO: 8093 - protein, 6 aa, synthetic construct
DNIYSN

SEQ ID NO: 8094 - protein, 6 aa, synthetic construct
ENIYSN

SEQ ID NO: 8095 - protein, 6 aa, synthetic construct
ENIYSN

SEQ ID NO: 8096 - protein, 6 aa, synthetic construct
ENIYSN

SEQ ID NO: 8097 - protein, 6 aa, synthetic construct
ENIYSN

SEQ ID NO: 8098 - protein, 6 aa, synthetic construct
ENIYSN

SEQ ID NO: 8099 - protein, 6 aa, synthetic construct
ENIYSN

SEQ ID NO: 8100 - protein, 6 aa, synthetic construct
ENIYSN

SEQ ID NO: 8101 - protein, 6 aa, synthetic construct
DNIYSN

SEQ ID NO: 8102 - protein, 6 aa, synthetic construct
ENIYSN

SEQ ID NO: 8103 - protein, 6 aa, synthetic construct
ENIYSN

SEQ ID NO: 8104 - protein, 6 aa, synthetic construct
ENIYSN

SEQ ID NO: 8105 - protein, 6 aa, synthetic construct
ENIYSN

SEQ ID NO: 8106 - protein, 6 aa, synthetic construct
ENIYSN

SEQ ID NO: 8107 - protein, 6 aa, synthetic construct
ENIYSN

SEQ ID NO: 8108 - protein, 6 aa, synthetic construct
ENIYSN

SEQ ID NO: 8109 - protein, 6 aa, synthetic construct
ENIYSN

SEQ ID NO: 8110 - protein, 6 aa, synthetic construct
ENIYSN

SEQ ID NO: 8111 - protein, 6 aa, synthetic construct
ENIYNN

SEQ ID NO: 8112 - protein, 6 aa, synthetic construct
ENIYSN

SEQ ID NO: 8113 - protein, 6 aa, synthetic construct
DHINNW

SEQ ID NO: 8114 - protein, 6 aa, synthetic construct
QDINSY

SEQ ID NO: 8115 - protein, 6 aa, synthetic construct
QDINGY

SEQ ID NO: 8116 - protein, 6 aa, synthetic construct
QDINSY

SEQ ID NO: 8117 - protein, 6 aa, synthetic construct
QDINGY

SEQ ID NO: 8118 - protein, 6 aa, synthetic construct
QDINSY

SEQ ID NO: 8119 - protein, 6 aa, synthetic construct
QDINSY

SEQ ID NO: 8120 - protein, 6 aa, synthetic construct
QDINSY

SEQ ID NO: 8121 - protein, 6 aa, synthetic construct
QDINSY

SEQ ID NO: 8122 - protein, 6 aa, synthetic construct
QDINSY

SEQ ID NO: 8123 - protein, 6 aa, synthetic construct
QDINSY

SEQ ID NO: 8124 - protein, 6 aa, synthetic construct
QDINSY

SEQ ID NO: 8125 - protein, 6 aa, synthetic construct
QDINSY

SEQ ID NO: 8126 - protein, 6 aa, synthetic construct
QDINSY

SEQ ID NO: 8127 - protein, 6 aa, synthetic construct
QDINSY

SEQ ID NO: 8128 - protein, 6 aa, synthetic construct
QDINSY

SEQ ID NO: 8129 - protein, 6 aa, synthetic construct
QDINSY

SEQ ID NO: 8130 - protein, 6 aa, synthetic construct
QDINSY

SEQ ID NO: 8131 - protein, 6 aa, synthetic construct
QDINSY

SEQ ID NO: 8132 - protein, 6 aa, synthetic construct
QDINSY

SEQ ID NO: 8133 - protein, 6 aa, synthetic construct
QDINSY

SEQ ID NO: 8134 - protein, 6 aa, synthetic construct
QDINSY

SEQ ID NO: 8135 - protein, 6 aa, synthetic construct
QDINSY

SEQ ID NO: 8136 - protein, 6 aa, synthetic construct
QDINSY

SEQ ID NO: 8137 - protein, 6 aa, synthetic construct
QDINSY

SEQ ID NO: 8138 - protein, 6 aa, synthetic construct
QDINSY

SEQ ID NO: 8139 - protein, 6 aa, synthetic construct
QDINSY

SEQ ID NO: 8140 - protein, 6 aa, synthetic construct
QDINSY

SEQ ID NO: 8141 - protein, 6 aa, synthetic construct
QDINSY

SEQ ID NO: 8142 - protein, 6 aa, synthetic construct
QDINSY

SEQ ID NO: 8143 - protein, 6 aa, synthetic construct
QDINSY

SEQ ID NO: 8144 - protein, 6 aa, synthetic construct
QDINSY

SEQ ID NO: 8145 - protein, 6 aa, synthetic construct
QDINSY

SEQ ID NO: 8146 - protein, 6 aa, synthetic construct
QDINGY

SEQ ID NO: 8147 - protein, 6 aa, synthetic construct
QDINSY

SEQ ID NO: 8148 - protein, 6 aa, synthetic construct
QDINSY

SEQ ID NO: 8149 - protein, 6 aa, synthetic construct
QDINSY

SEQ ID NO: 8150 - protein, 6 aa, synthetic construct
QDINSY

SEQ ID NO: 8151 - protein, 6 aa, synthetic construct
QDINSY

SEQ ID NO: 8152 - protein, 6 aa, synthetic construct
QDINSY

SEQ ID NO: 8153 - protein, 6 aa, synthetic construct
QDINSY

SEQ ID NO: 8154 - protein, 6 aa, synthetic construct
QDINSY

SEQ ID NO: 8155 - protein, 6 aa, synthetic construct
QDINSY

SEQ ID NO: 8156 - protein, 6 aa, synthetic construct
QDIVKN

SEQ ID NO: 8157 - protein, 6 aa, synthetic construct
QDIVKN

SEQ ID NO: 8158 - protein, 6 aa, synthetic construct
QDIVKN

SEQ ID NO: 8159 - protein, 6 aa, synthetic construct
QDIVKN

SEQ ID NO: 8160 - protein, 6 aa, synthetic construct
QDIVKN

SEQ ID NO: 8161 - protein, 6 aa, synthetic construct
QDIVKN

SEQ ID NO: 8162 - protein, 6 aa, synthetic construct
QDIVKN

SEQ ID NO: 8163 - protein, 6 aa, synthetic construct
QDIVKN

SEQ ID NO: 8164 - protein, 6 aa, synthetic construct
QDIVKN

SEQ ID NO: 8165 - protein, 6 aa, synthetic construct
QDIVKN

SEQ ID NO: 8166 - protein, 6 aa, synthetic construct
QDIVKN

SEQ ID NO: 8167 - protein, 6 aa, synthetic construct
QDIVKN

SEQ ID NO: 8168 - protein, 6 aa, synthetic construct
QDIVKN

SEQ ID NO: 8169 - protein, 6 aa, synthetic construct
QNINVW

SEQ ID NO: 8170 - protein, 6 aa, synthetic construct
QNINVW

SEQ ID NO: 8171 - protein, 6 aa, synthetic construct
TDIDDD

SEQ ID NO: 8172 - protein, 6 aa, synthetic construct
TDIDDD

SEQ ID NO: 8173 - protein, 6 aa, synthetic construct
TDIDDD

SEQ ID NO: 8174 - protein, 6 aa, synthetic construct
TDIDDD

SEQ ID NO: 8175 - protein, 6 aa, synthetic construct
TDIDDD

SEQ ID NO: 8176 - protein, 6 aa, synthetic construct
TDIDDD

SEQ ID NO: 8177 - protein, 6 aa, synthetic construct
IDIDDD

SEQ ID NO: 8178 - protein, 6 aa, synthetic construct
TDIDDD

SEQ ID NO: 8179 - protein, 6 aa, synthetic construct
TDIDDD

SEQ ID NO: 8180 - protein, 6 aa, synthetic construct
TDIDDD

SEQ ID NO: 8181 - protein, 6 aa, synthetic construct
TDIDDD

SEQ ID NO: 8182 - protein, 6 aa, synthetic construct
QDINKY

SEQ ID NO: 8183 - protein, 6 aa, synthetic construct
QDINKY

SEQ ID NO: 8184 - protein, 6 aa, synthetic construct
QDINKY

SEQ ID NO: 8185 - protein, 6 aa, synthetic construct
QDINKY

SEQ ID NO: 8186 - protein, 6 aa, synthetic construct
QDINKY

SEQ ID NO: 8187 - protein, 10 aa, synthetic construct
ESVDNYGISF

SEQ ID NO: 8188 - protein, 10 aa, synthetic construct
ESVDNYGISF

SEQ ID NO: 8189 - protein, 10 aa, synthetic construct
QSVDYDGDSY

SEQ ID NO: 8190 - protein, 10 aa, synthetic construct
QSVDYDGDSY

SEQ ID NO: 8191 - protein, 10 aa, synthetic construct
QSVDYDGDSY

SEQ ID NO: 8192 - protein, 10 aa, synthetic construct
QSVDYDGDSY

SEQ ID NO: 8193 - protein, 10 aa, synthetic construct
QSVDYDGDSY

SEQ ID NO: 8194 - protein, 10 aa, synthetic construct
QSVDYDGDSY

SEQ ID NO: 8195 - protein, 10 aa, synthetic construct
QSVDYDGDSY

SEQ ID NO: 8196 - protein, 10 aa, synthetic construct
QSVDYDGDSY

SEQ ID NO: 8197 - protein, 10 aa, synthetic construct
QSVDYDGDSY

SEQ ID NO: 8198 - protein, 10 aa, synthetic construct
QSVDYDGDSY

SEQ ID NO: 8199 - protein, 10 aa, synthetic construct
QSVDYDGDSY

SEQ ID NO: 8200 - protein, 10 aa, synthetic construct
QSVDYDGDSY

SEQ ID NO: 8201 - protein, 10 aa, synthetic construct
QSVDYDGDSY

SEQ ID NO: 8202 - protein, 10 aa, synthetic construct
QSVDYDGDSY

SEQ ID NO: 8203 - protein, 10 aa, synthetic construct
QSVDYDGDSY

SEQ ID NO: 8204 - protein, 10 aa, synthetic construct
QSVDYDGDSY

SEQ ID NO: 8205 - protein, 10 aa, synthetic construct
QSVDYDGDSY

SEQ ID NO: 8206 - protein, 10 aa, synthetic construct
QSVDYDGDSY

SEQ ID NO: 8207 - protein, 10 aa, synthetic construct
QSVDYDGDSY

SEQ ID NO: 8208 - protein, 10 aa, synthetic construct
QSVDYDGDSY

SEQ ID NO: 8209 - protein, 10 aa, synthetic construct
QSVDYDGDSY

SEQ ID NO: 8210 - protein, 10 aa, synthetic construct
QSVDYDGDSY

SEQ ID NO: 8211 - protein, 10 aa, synthetic construct
QSVDYDGDSY

SEQ ID NO: 8212 - protein, 10 aa, synthetic construct
QSVDYDGDSY

SEQ ID NO: 8213 - protein, 10 aa, synthetic construct
QSVDYDGDSY

SEQ ID NO: 8214 - protein, 10 aa, synthetic construct
QSVDYDGDSY

SEQ ID NO: 8215 - protein, 10 aa, synthetic construct
QSVDYDGDSY

SEQ ID NO: 8216 - protein, 10 aa, synthetic construct
QSVDYDGDSY

SEQ ID NO: 8217 - protein, 10 aa, synthetic construct
ETVDSYGYSF

SEQ ID NO: 8218 - protein, 10 aa, synthetic construct
QSVSTSSYSY

SEQ ID NO: 8219 - protein, 10 aa, synthetic construct
QSVSTSSYSY

SEQ ID NO: 8220 - protein, 10 aa, synthetic construct
QSVSTSSYSY

SEQ ID NO: 8221 - protein, 10 aa, synthetic construct
QSVSTSSYSY

SEQ ID NO: 8222 - protein, 10 aa, synthetic construct
QSVSTSSYSY

SEQ ID NO: 8223 - protein, 10 aa, synthetic construct
QSVSTSSYSY

SEQ ID NO: 8224 - protein, 10 aa, synthetic construct
QSVSTSSYSY

SEQ ID NO: 8225 - protein, 5 aa, synthetic construct
SSVNY

SEQ ID NO: 8226 - protein, 5 aa, synthetic construct
SSVNY

SEQ ID NO: 8227 - protein, 5 aa, synthetic construct
SSVNY

SEQ ID NO: 8228 - protein, 5 aa, synthetic construct
SSVNY

SEQ ID NO: 8229 - protein, 5 aa, synthetic construct
SSVNY

SEQ ID NO: 8230 - protein, 5 aa, synthetic construct
SSVNY

SEQ ID NO: 8231 - protein, 5 aa, synthetic construct
SSVSY

SEQ ID NO: 8232 - protein, 5 aa, synthetic construct
SSVSY

SEQ ID NO: 8233 - protein, 5 aa, synthetic construct
SSVSY

SEQ ID NO: 8234 - protein, 5 aa, synthetic construct
LSVSD

SEQ ID NO: 8235 - protein, 5 aa, synthetic construct
SSVSY

SEQ ID NO: 8236 - protein, 5 aa, synthetic construct
SSVSY

SEQ ID NO: 8237 - protein, 5 aa, synthetic construct
SSVSY

SEQ ID NO: 8238 - protein, 5 aa, synthetic construct
SSVSY

SEQ ID NO: 8239 - protein, 5 aa, synthetic construct
SSVSY

SEQ ID NO: 8240 - protein, 5 aa, synthetic construct
SSVSY

SEQ ID NO: 8241 - protein, 5 aa, synthetic construct
SSVSY

SEQ ID NO: 8242 - protein, 5 aa, synthetic construct
SSVSY

SEQ ID NO: 8243 - protein, 5 aa, synthetic construct
SSVSY

SEQ ID NO: 8244 - protein, 5 aa, synthetic construct
SSVSY

SEQ ID NO: 8245 - protein, 5 aa, synthetic construct
SSVSY

SEQ ID NO: 8246 - protein, 5 aa, synthetic construct
SSVSY

SEQ ID NO: 8247 - protein, 5 aa, synthetic construct
SSVSY

SEQ ID NO: 8248 - protein, 5 aa, synthetic construct
SSVSY

SEQ ID NO: 8249 - protein, 5 aa, synthetic construct
SSVSY

SEQ ID NO: 8250 - protein, 5 aa, synthetic construct
SSVSY

SEQ ID NO: 8251 - protein, 5 aa, synthetic construct
SSVSY

SEQ ID NO: 8252 - protein, 5 aa, synthetic construct
SSVSY

SEQ ID NO: 8253 - protein, 5 aa, synthetic construct
SSVSY

SEQ ID NO: 8254 - protein, 5 aa, synthetic construct
SSVSY

SEQ ID NO: 8255 - protein, 5 aa, synthetic construct
SSISY

SEQ ID NO: 8256 - protein, 5 aa, synthetic construct
SSVSY

SEQ ID NO: 8257 - protein, 7 aa, synthetic construct
SSVSSSY

SEQ ID NO: 8258 - protein, 7 aa, synthetic construct
SSVSSSY

SEQ ID NO: 8259 - protein, 7 aa, synthetic construct
SSVSSSY

SEQ ID NO: 8260 - protein, 7 aa, synthetic construct
SSVSSSY

SEQ ID NO: 8261 - protein, 7 aa, synthetic construct
SSVSSSY

SEQ ID NO: 8262 - protein, 6 aa, synthetic construct
QSISDY

SEQ ID NO: 8263 - protein, 6 aa, synthetic construct
QSISDY

SEQ ID NO: 8264 - protein, 6 aa, synthetic construct
QSISDY

SEQ ID NO: 8265 - protein, 6 aa, synthetic construct
QSISDY

SEQ ID NO: 8266 - protein, 6 aa, synthetic construct
QSISDY

SEQ ID NO: 8267 - protein, 6 aa, synthetic construct
QSISNN

SEQ ID NO: 8268 - protein, 6 aa, synthetic construct
ENVVTY

SEQ ID NO: 8269 - protein, 6 aa, synthetic construct
ENVVTY

SEQ ID NO: 8270 - protein, 6 aa, synthetic construct
ENVVTY

SEQ ID NO: 8271 - protein, 6 aa, synthetic construct
ENVVTY

SEQ ID NO: 8272 - protein, 6 aa, synthetic construct
QDINSY

SEQ ID NO: 8273 - protein, 6 aa, synthetic construct
ENVVTY

SEQ ID NO: 8274 - protein, 6 aa, synthetic construct
ENVVTY

SEQ ID NO: 8275 - protein, 6 aa, synthetic construct
ENVVTY

SEQ ID NO: 8276 - protein, 6 aa, synthetic construct
ENVVTY

SEQ ID NO: 8277 - protein, 6 aa, synthetic construct
ENVVTY

SEQ ID NO: 8278 - protein, 6 aa, synthetic construct
ENVVTY

SEQ ID NO: 8279 - protein, 6 aa, synthetic construct
ENVGTY

SEQ ID NO: 8280 - protein, 6 aa, synthetic construct
QDVGTA

SEQ ID NO: 8281 - protein, 6 aa, synthetic construct
QDVGTA

SEQ ID NO: 8282 - protein, 6 aa, synthetic construct
QDVGTA

SEQ ID NO: 8283 - protein, 6 aa, synthetic construct
QDVSTA

SEQ ID NO: 8284 - protein, 6 aa, synthetic construct
QSVSND

SEQ ID NO: 8285 - protein, 6 aa, synthetic construct
QSVSND

SEQ ID NO: 8286 - protein, 12 aa, synthetic construct
ESLYSSKHKVHY

SEQ ID NO: 8287 - protein, 12 aa, synthetic construct
ESLYSSKHKVHY

SEQ ID NO: 8288 - protein, 12 aa, synthetic construct
QSLLNSSNQKNY

SEQ ID NO: 8289 - protein, 12 aa, synthetic construct
QSLLNSSNQKNY

SEQ ID NO: 8290 - protein, 12 aa, synthetic construct
QSLLYSTNQKNY

SEQ ID NO: 8291 - protein, 12 aa, synthetic construct
QSLLYSTNQKNY

SEQ ID NO: 8292 - protein, 6 aa, synthetic construct
QDIGIS

SEQ ID NO: 8293 - protein, 6 aa, synthetic construct
QDIHGY

SEQ ID NO: 8294 - protein, 6 aa, synthetic construct
QEISGY

SEQ ID NO: 8295 - protein, 6 aa, synthetic construct
QDIHGY

SEQ ID NO: 8296 - protein, 6 aa, synthetic construct
QEISGY

SEQ ID NO: 8297 - protein, 9 aa, synthetic construct
TGAVTTSNY

SEQ ID NO: 8298 - protein, 9 aa, synthetic construct
TGAVTTSNY

SEQ ID NO: 8299 - protein, 9 aa, synthetic construct
TGAVTTSNY

SEQ ID NO: 8300 - protein, 9 aa, synthetic construct
TGAVTTSNY

SEQ ID NO: 8301 - protein, 9 aa, synthetic construct
TGAVTTSNY

SEQ ID NO: 8302 - protein, 9 aa, synthetic construct
TGAVTTSNY

SEQ ID NO: 8303 - protein, 9 aa, synthetic construct
TGAVTTSNY

SEQ ID NO: 8304 - protein, 9 aa, synthetic construct
TGAVTTSNY

SEQ ID NO: 8305 - protein, 9 aa, synthetic construct
TGAVTTSNY

SEQ ID NO: 8306 - protein, 9 aa, synthetic construct
TGAVTTSNY

SEQ ID NO: 8307 - protein, 9 aa, synthetic construct
TGAVTTSNY

SEQ ID NO: 8308 - protein, 9 aa, synthetic construct
TGAVTTSNY

SEQ ID NO: 8309 - protein, 9 aa, synthetic construct
TGAVTTSNY

SEQ ID NO: 8310 - protein, 9 aa, synthetic construct
TGAVTTSNY

SEQ ID NO: 8311 - protein, 9 aa, synthetic construct
TGAVTTSNY

SEQ ID NO: 8312 - protein, 9 aa, synthetic construct
TGAVTTSNY

SEQ ID NO: 8313 - protein, 9 aa, synthetic construct
TGAVTTSNY

SEQ ID NO: 8314 - protein, 9 aa, synthetic construct
TGAVTTSNY

SEQ ID NO: 8315 - protein, 9 aa, synthetic construct
TGAVTTSNY

SEQ ID NO: 8316 - protein, 7 aa, synthetic construct
SQHSTYT

SEQ ID NO: 8317 - protein, 7 aa, synthetic construct
SQHSTYT

SEQ ID NO: 8318 - protein, 7 aa, synthetic construct
SQHSTYT

SEQ ID NO: 8319 - protein, 7 aa, synthetic construct
SQHSTYT

SEQ ID NO: 8320 - protein, 7 aa, synthetic construct
SQHSTYT

SEQ ID NO: 8321-8825 - skipped (505 entries)

SEQ ID NO: 8826 - protein, 7 aa, synthetic construct
LKKDGSH

SEQ ID NO: 8827 - protein, 7 aa, synthetic construct
LKKDGSH

SEQ ID NO: 8828 - protein, 7 aa, synthetic construct
LKKDGSH

SEQ ID NO: 8829 - protein, 7 aa, synthetic construct
LKKDGSH

SEQ ID NO: 8830 - protein, 7 aa, synthetic construct
LKKDGSH

SEQ ID NO: 8831-9248 - skipped (418 entries)

SEQ ID NO: 9249 - protein, 5 aa, synthetic construct
SYSMG

SEQ ID NO: 9250 - protein, 5 aa, synthetic construct
FNAMG

SEQ ID NO: 9251 - skipped

SEQ ID NO: 9252 - protein, 17 aa, synthetic construct
AISWSGDETSYADSVKG

SEQ ID NO: 9253 - protein, 16 aa, synthetic construct
TIARAGATKYADSVKG

SEQ ID NO: 9254 - protein, 20 aa, synthetic construct
AVRWSSTGIYYTQYADSVKS

SEQ ID NO: 9255 - protein, 13 aa, synthetic construct
DRWWRPAGLQWDY

SEQ ID NO: 9256 - protein, 9 aa, synthetic construct
RVFDLPNDY

SEQ ID NO: 9257 - protein, 15 aa, synthetic construct
DTYNSNPARWDGYDF

SEQ ID NO: 9258 - protein, 546 aa, Nipah henipavirus
MVVILDKRCYCNLLILILMISECSVGILHYEKLSKIGLVKGVTRKYKIKSNPLTKDIVIKMIPNVSNMSQCTGSVMENYKTRLNGILTPIKGALEIYKNNTHDLVGDVRLAGVIMAGVAIGIATAAQITAGVALYEAMKNADNINKLKSSIESTNEAVVKLQETAEKTVYVLTALQDYINTNLVPTIDKISCKQTELSLDLALSKYLSDLLFVFGPNLQDPVSNSMTIQAISQAFGGNYETLLRTLGYATEDFDDLLESDSITGQIIYVDLSSYYIIVRVYFPILTEIQQAYIQELLPVSFNNDNSEWISIVPNFILVRNTLISNIEIGFCLITKRSVICNQDYATPMTNNMRECLTGSTEKCPRELVVSSHVPRFALSNGVLFANCISVTCQCQTTGRAISQSGEQTLLMIDNTTCPTAVLGNVIISLGKYLGSVNYNSEGIAIGPPVFTDKVDISSQISSMNQSLQQSKDYIKEAQRLLDTVNPSLISMLSMIILYVLSIASLCIGLITFISFIIVEKKRNTYSRLEDRRVRPTSSGDLYYIGT

SEQ ID NO: 9259 - protein, 520 aa, Nipah henipavirus
ILHYEKLSKIGLVKGVTRKYKIKSNPLTKDIVIKMIPNVSNMSQCTGSVMENYKTRLNGILTPIKGALEIYKNNTHDLVGDVRLAGVIMAGVAIGIATAAQITAGVALYEAMKNADNINKLKSSIESTNEAVVKLQETAEKTVYVLTALQDYINTNLVPTIDKISCKQTELSLDLALSKYLSDLLFVFGPNLQDPVSNSMTIQAISQAFGGNYETLLRTLGYATEDFDDLLESDSITGQIIYVDLSSYYIIVRVYFPILTEIQQAYIQELLPVSFNNDNSEWISIVPNFILVRNTLISNIEIGFCLITKRSVICNQDYATPMTNNMRECLTGSTEKCPRELVVSSHVPRFALSNGVLFANCISVTCQCQTTGRAISQSGEQTLLMIDNTTCPTAVLGNVIISLGKYLGSVNYNSEGIAIGPPVFTDKVDISSQISSMNQSLQQSKDYIKEAQRLLDTVNPSLISMLSMIILYVLSIASLCIGLITFISFIIVEKKRNTYSRLEDRRVRPTSSGDLYYIGT

SEQ ID NO: 9260 - protein, 83 aa, Nipah henipavirus
ILHYEKLSKIGLVKGVTRKYKIKSNPLTKDIVIKMIPNVSNMSQCTGSVMENYKTRLNGILTPIKGALEIYKNNTHDLVGDVR

SEQ ID NO: 9261 - protein, 437 aa, Nipah henipavirus
LAGVIMAGVAIGIATAAQITAGVALYEAMKNADNINKLKSSIESTNEAVVKLQETAEKTVYVLTALQDYINTNLVPTIDKISCKQTELSLDLALSKYLSDLLFVFGPNLQDPVSNSMTIQAISQAFGGNYETLLRTLGYATEDFDDLLESDSITGQIIYVDLSSYYIIVRVYFPILTEIQQAYIQELLPVSFNNDNSEWISIVPNFILVRNTLISNIEIGFCLITKRSVICNQDYATPMTNNMRECLTGSTEKCPRELVVSSHVPRFALSNGVLFANCISVTCQCQTTGRAISQSGEQTLLMIDNTTCPTAVLGNVIISLGKYLGSVNYNSEGIAIGPPVFTDKVDISSQISSMNQSLQQSKDYIKEAQRLLDTVNPSLISMLSMIILYVLSIASLCIGLITFISFIIVEKKRNTYSRLEDRRVRPTSSGDLYYIGT

SEQ ID NO: 9262 - protein, 500 aa, synthetic construct
ILHYEKLSKIGLVKGVTRKYKIKSNPLTKDIVIKMIPNVSNMSQCTGSVMENYKTRLNGILTPIKGALEIYKNNTHDLVGDVRLAGVIMAGVAIGIATAAQITAGVALYEAMKNADNINKLKSSIESTNEAVVKLQETAEKTVYVLTALQDYINTNLVPTIDKISCKQTELSLDLALSKYLSDLLFVFGPNLQDPVSNSMTIQAISQAFGGNYETLLRTLGYATEDFDDLLESDSITGQIIYVDLSSYYIIVRVYFPILTEIQQAYIQELLPVSFNNDNSEWISIVPNFILVRNTLISNIEIGFCLITKRSVICNQDYATPMTNNMRECLTGSTEKCPRELVVSSHVPRFALSNGVLFANCISVTCQCQTTGRAISQSGEQTLLMIDNTTCPTAVLGNVIISLGKYLGSVNYNSEGIAIGPPVFTDKVDISSQISSMNQSLQQSKDYIKEAQRLLDTVNPSLISMLSMIILYVLSIASLCIGLITFISFIIVEKKRNTGT

SEQ ID NO: 9263 - protein, 417 aa, synthetic construct
LAGVIMAGVAIGIATAAQITAGVALYEAMKNADNINKLKSSIESTNEAVVKLQETAEKTVYVLTALQDYINTNLVPTIDKISCKQTELSLDLALSKYLSDLLFVFGPNLQDPVSNSMTIQAISQAFGGNYETLLRTLGYATEDFDDLLESDSITGQIIYVDLSSYYIIVRVYFPILTEIQQAYIQELLPVSFNNDNSEWISIVPNFILVRNTLISNIEIGFCLITKRSVICNQDYATPMTNNMRECLTGSTEKCPRELVVSSHVPRFALSNGVLFANCISVTCQCQTTGRAISQSGEQTLLMIDNTTCPTAVLGNVIISLGKYLGSVNYNSEGIAIGPPVFTDKVDISSQISSMNQSLQQSKDYIKEAQRLLDTVNPSLISMLSMIILYVLSIASLCIGLITFISFIIVEKKRNTGT

SEQ ID NO: 9264 - protein, 500 aa, synthetic construct
ILHYEKLSKIGLVKGVTRKYKIKSNPLTKDIVIKMIPNVSNMSQCTGSVMENYKTRLNGILTPIKGALEIYKNQTHDLVGDVRLAGVIMAGVAIGIATAAQITAGVALYEAMKNADNINKLKSSIESTNEAVVKLQETAEKTVYVLTALQDYINTNLVPTIDKISCKQTELSLDLALSKYLSDLLFVFGPNLQDPVSNSMTIQAISQAFGGNYETLLRTLGYATEDFDDLLESDSITGQIIYVDLSSYYIIVRVYFPILTEIQQAYIQELLPVSFNNDNSEWISIVPNFILVRNTLISNIEIGFCLITKRSVICNQDYATPMTNNMRECLTGSTEKCPRELVVSSHVPRFALSNGVLFANCISVTCQCQTTGRAISQSGEQTLLMIDNTTCPTAVLGNVIISLGKYLGSVNYNSEGIAIGPPVFTDKVDISSQISSMNQSLQQSKDYIKEAQRLLDTVNPSLISMLSMIILYVLSIASLCIGLITFISFIIVEKKRNTGT

SEQ ID NO: 9265 - protein, 524 aa, synthetic construct
MVVILDKRCYCNLLILILMISECSVGILHYEKLSKIGLVKGVTRKYKIKSNPLTKDIVIKMIPNVSNMSQCTGSVMENYKTRLNGILTPIKGALEIYKNNTHDLVGDVRLAGVIMAGVAIGIATAAQITAGVALYEAMKNADNINKLKSSIESTNEAVVKLQETAEKTVYVLTALQDYINTNLVPTIDKISCKQTELSLDLALSKYLSDLLFVFGPNLQDPVSNSMTIQAISQAFGGNYETLLRTLGYATEDFDDLLESDSITGQIIYVDLSSYYIIVRVYFPILTEIQQAYIQELLPVSFNNDNSEWISIVPNFILVRNTLISNIEIGFCLITKRSVICNQDYATPMTNNMRECLTGSTEKCPRELVVSSHVPRFALSNGVLFANCISVTCQCQTTGRAISQSGEQTLLMIDNTTCPTAVLGNVIISLGKYLGSVNYNSEGIAIGPPVFTDKVDISSQISSMNQSLQQSKDYIKEAQRLLDTVNPSLISMLSMIILYVLSIASLCIGLITFISFIIVEKKRNT

SEQ ID NO: 9266 - protein, 602 aa, synthetic construct
MGPAENKKVRFENTTSDKGKIPSKVIKSYYGTMDIKKINEGLLDSKILSAFNTVIALLGSIVIIVMNIMIIQNYTRSTDNQAVIKDALQGIQQQIKGLADKIGTEIGPKVSLIDTSSTITIPANIGLLGSKISQSTASINENVNEKCKFTLPPLKIHECNISCPNPLPFREYRPQTEGVSNLVGLPNNICLQKTSNQILKPKLISYTLPVVGQSGTCITDPLLAMDEGYFAYSHLERIGSCSRGVSKQRIIGVGEVLDRGDEVPSLFMTNVWTPPNPNTVYHCSAVYNNEFYYVLCAVSTVGDPILNSTYWSGSLMMTRLAVKPKSNGGGYNQHQLALRSIEKGRYDKVMPYGPSGIKQGDTLYFPAVGFLVRTEFKYNDSNCPITKCQYSKPENCRLSMGIRPNSHYILRSGLLKYNLSDGENPKVVFIEISDQRLSIGSPSKIYDSLGQPVFYQASFSWDTMIKFGDVLTVNPLVVNWRNNTVISRPGQSQCPRFNTCPEICWEGVYNDAFLIDRINWISAGVFLDSNQTAENPVFTVFKDNEILYRAQLASEDTNAQKTITNCFLLKNKIWCISLVEIYDTGDNVIRPKLFAVKIPEQC

SEQ ID NO: 9267 - protein, 597 aa, synthetic construct
MGKVRFENTTSDKGKIPSKVIKSYYGTMDIKKINEGLLDSKILSAFNTVIALLGSIVIIVMNIMIIQNYTRSTDNQAVIKDALQGIQQQIKGLADKIGTEIGPKVSLIDTSSTITIPANIGLLGSKISQSTASINENVNEKCKFTLPPLKIHECNISCPNPLPFREYRPQTEGVSNLVGLPNNICLQKTSNQILKPKLISYTLPVVGQSGTCITDPLLAMDEGYFAYSHLERIGSCSRGVSKQRIIGVGEVLDRGDEVPSLFMTNVWTPPNPNTVYHCSAVYNNEFYYVLCAVSTVGDPILNSTYWSGSLMMTRLAVKPKSNGGGYNQHQLALRSIEKGRYDKVMPYGPSGIKQGDTLYFPAVGFLVRTEFKYNDSNCPITKCQYSKPENCRLSMGIRPNSHYILRSGLLKYNLSDGENPKVVFIEISDQRLSIGSPSKIYDSLGQPVFYQASFSWDTMIKFGDVLTVNPLVVNWRNNTVISRPGQSQCPRFNTCPEICWEGVYNDAFLIDRINWISAGVFLDSNQTAENPVFTVFKDNEILYRAQLASEDTNAQKTITNCFLLKNKIWCISLVEIYDTGDNVIRPKLFAVKIPEQC

SEQ ID NO: 9268 - protein, 592 aa, synthetic construct
MGNTTSDKGKIPSKVIKSYYGTMDIKKINEGLLDSKILSAFNTVIALLGSIVIIVMNIMIIQNYTRSTDNQAVIKDALQGIQQQIKGLADKIGTEIGPKVSLIDTSSTITIPANIGLLGSKISQSTASINENVNEKCKFTLPPLKIHECNISCPNPLPFREYRPQTEGVSNLVGLPNNICLQKTSNQILKPKLISYTLPVVGQSGTCITDPLLAMDEGYFAYSHLERIGSCSRGVSKQRIIGVGEVLDRGDEVPSLFMTNVWTPPNPNTVYHCSAVYNNEFYYVLCAVSTVGDPILNSTYWSGSLMMTRLAVKPKSNGGGYNQHQLALRSIEKGRYDKVMPYGPSGIKQGDTLYFPAVGFLVRTEFKYNDSNCPITKCQYSKPENCRLSMGIRPNSHYILRSGLLKYNLSDGENPKVVFIEISDQRLSIGSPSKIYDSLGQPVFYQASFSWDTMIKFGDVLTVNPLVVNWRNNTVISRPGQSQCPRFNTCPEICWEGVYNDAFLIDRINWISAGVFLDSNQTAENPVFTVFKDNEILYRAQLASEDTNAQKTITNCFLLKNKIWCISLVEIYDTGDNVIRPKLFAVKIPEQC

SEQ ID NO: 9269 - protein, 587 aa, synthetic construct
MGKGKIPSKVIKSYYGTMDIKKINEGLLDSKILSAFNTVIALLGSIVIIVMNIMIIQNYTRSTDNQAVIKDALQGIQQQIKGLADKIGTEIGPKVSLIDTSSTITIPANIGLLGSKISQSTASINENVNEKCKFTLPPLKIHECNISCPNPLPFREYRPQTEGVSNLVGLPNNICLQKTSNQILKPKLISYTLPVVGQSGTCITDPLLAMDEGYFAYSHLERIGSCSRGVSKQRIIGVGEVLDRGDEVPSLFMTNVWTPPNPNTVYHCSAVYNNEFYYVLCAVSTVGDPILNSTYWSGSLMMTRLAVKPKSNGGGYNQHQLALRSIEKGRYDKVMPYGPSGIKQGDTLYFPAVGFLVRTEFKYNDSNCPITKCQYSKPENCRLSMGIRPNSHYILRSGLLKYNLSDGENPKVVFIEISDQRLSIGSPSKIYDSLGQPVFYQASFSWDTMIKFGDVLTVNPLVVNWRNNTVISRPGQSQCPRFNTCPEICWEGVYNDAFLIDRINWISAGVFLDSNQTAENPVFTVFKDNEILYRAQLASEDTNAQKTITNCFLLKNKIWCISLVEIYDTGDNVIRPKLFAVKIPEQC

SEQ ID NO: 9270 - protein, 582 aa, synthetic construct
MGSKVIKSYYGTMDIKKINEGLLDSKILSAFNTVIALLGSIVIIVMNIMIIQNYTRSTDNQAVIKDALQGIQQQIKGLADKIGTEIGPKVSLIDTSSTITIPANIGLLGSKISQSTASINENVNEKCKFTLPPLKIHECNISCPNPLPFREYRPQTEGVSNLVGLPNNICLQKTSNQILKPKLISYTLPVVGQSGTCITDPLLAMDEGYFAYSHLERIGSCSRGVSKQRIIGVGEVLDRGDEVPSLFMTNVWTPPNPNTVYHCSAVYNNEFYYVLCAVSTVGDPILNSTYWSGSLMMTRLAVKPKSNGGGYNQHQLALRSIEKGRYDKVMPYGPSGIKQGDTLYFPAVGFLVRTEFKYNDSNCPITKCQYSKPENCRLSMGIRPNSHYILRSGLLKYNLSDGENPKVVFIEISDQRLSIGSPSKIYDSLGQPVFYQASFSWDTMIKFGDVLTVNPLVVNWRNNTVISRPGQSQCPRFNTCPEICWEGVYNDAFLIDRINWISAGVFLDSNQTAENPVFTVFKDNEILYRAQLASEDTNAQKTITNCFLLKNKIWCISLVEIYDTGDNVIRPKLFAVKIPEQC

SEQ ID NO: 9271 - protein, 577 aa, synthetic construct
MGSYYGTMDIKKINEGLLDSKILSAFNTVIALLGSIVIIVMNIMIIQNYTRSTDNQAVIKDALQGIQQQIKGLADKIGTEIGPKVSLIDTSSTITIPANIGLLGSKISQSTASINENVNEKCKFTLPPLKIHECNISCPNPLPFREYRPQTEGVSNLVGLPNNICLQKTSNQILKPKLISYTLPVVGQSGTCITDPLLAMDEGYFAYSHLERIGSCSRGVSKQRIIGVGEVLDRGDEVPSLFMTNVWTPPNPNTVYHCSAVYNNEFYYVLCAVSTVGDPILNSTYWSGSLMMTRLAVKPKSNGGGYNQHQLALRSIEKGRYDKVMPYGPSGIKQGDTLYFPAVGFLVRTEFKYNDSNCPITKCQYSKPENCRLSMGIRPNSHYILRSGLLKYNLSDGENPKVVFIEISDQRLSIGSPSKIYDSLGQPVFYQASFSWDTMIKFGDVLTVNPLVVNWRNNTVISRPGQSQCPRFNTCPEICWEGVYNDAFLIDRINWISAGVFLDSNQTAENPVFTVFKDNEILYRAQLASEDTNAQKTITNCFLLKNKIWCISLVEIYDTGDNVIRPKLFAVKIPEQC

SEQ ID NO: 9272 - protein, 573 aa, synthetic construct
MGTMDIKKINEGLLDSKILSAFNTVIALLGSIVIIVMNIMIIQNYTRSTDNQAVIKDALQGIQQQIKGLADKIGTEIGPKVSLIDTSSTITIPANIGLLGSKISQSTASINENVNEKCKFTLPPLKIHECNISCPNPLPFREYRPQTEGVSNLVGLPNNICLQKTSNQILKPKLISYTLPVVGQSGTCITDPLLAMDEGYFAYSHLERIGSCSRGVSKQRIIGVGEVLDRGDEVPSLFMTNVWTPPNPNTVYHCSAVYNNEFYYVLCAVSTVGDPILNSTYWSGSLMMTRLAVKPKSNGGGYNQHQLALRSIEKGRYDKVMPYGPSGIKQGDTLYFPAVGFLVRTEFKYNDSNCPITKCQYSKPENCRLSMGIRPNSHYILRSGLLKYNLSDGENPKVVFIEISDQRLSIGSPSKIYDSLGQPVFYQASFSWDTMIKFGDVLTVNPLVVNWRNNTVISRPGQSQCPRFNTCPEICWEGVYNDAFLIDRINWISAGVFLDSNQTAENPVFTVFKDNEILYRAQLASEDTNAQKTITNCFLLKNKIWCISLVEIYDTGDNVIRPKLFAVKIPEQC

SEQ ID NO: 9273 - protein, 569 aa, synthetic construct
MKKINEGLLDSKILSAFNTVIALLGSIVIIVMNIMIIQNYTRSTDNQAVIKDALQGIQQQIKGLADKIGTEIGPKVSLIDTSSTITIPANIGLLGSKISQSTASINENVNEKCKFTLPPLKIHECNISCPNPLPFREYRPQTEGVSNLVGLPNNICLQKTSNQILKPKLISYTLPVVGQSGTCITDPLLAMDEGYFAYSHLERIGSCSRGVSKQRIIGVGEVLDRGDEVPSLFMTNVWTPPNPNTVYHCSAVYNNEFYYVLCAVSTVGDPILNSTYWSGSLMMTRLAVKPKSNGGGYNQHQLALRSIEKGRYDKVMPYGPSGIKQGDTLYFPAVGFLVRTEFKYNDSNCPITKCQYSKPENCRLSMGIRPNSHYILRSGLLKYNLSDGENPKVVFIEISDQRLSIGSPSKIYDSLGQPVFYQASFSWDTMIKFGDVLTVNPLVVNWRNNTVISRPGQSQCPRFNTCPAICAEGVYNDAFLIDRINWISAGVFLDSNATAANPVFTVFKDNEILYRAQLASEDTNAQKTITNCFLLKNKIWCISLVEIYDTGDNVIRPKLFAVKIPEQCT

SEQ ID NO: 9274 - protein, 546 aa, Hendra henipavirus
MATQEVRLKCLLCGIIVLVLSLEGLGILHYEKLSKIGLVKGITRKYKIKSNPLTKDIVIKMIPNVSNVSKCTGTVMENYKSRLTGILSPIKGAIELYNNNTHDLVGDVKLAGVVMAGIAIGIATAAQITAGVALYEAMKNADNINKLKSSIESTNEAVVKLQETAEKTVYVLTALQDYINTNLVPTIDQISCKQTELALDLALSKYLSDLLFVFGPNLQDPVSNSMTIQAISQAFGGNYETLLRTLGYATEDFDDLLESDSIAGQIVYVDLSSYYIIVRVYFPILTEIQQAYVQELLPVSFNNDNSEWISIVPNFVLIRNTLISNIEVKYCLITKKSVICNQDYATPMTASVRECLTGSTDKCPRELVVSSHVPRFALSGGVLFANCISVTCQCQTTGRAISQSGEQTLLMIDNTTCTTVVLGNIIISLGKYLGSINYNSESIAVGPPVYTDKVDISSQISSMNQSLQQSKDYIKEAQKILDTVNPSLISMLSMIILYVLSIAALCIGLITFISFVIVEKKRGNYSRLDDRQVRPVSNGDLYYIGT

SEQ ID NO: 9275 - protein, 604 aa, Hendra henipavirus
MMADSKLVSLNNNLSGKIKDQGKVIKNYYGTMDIKKINDGLLDSKILGAFNTVIALLGSIIIIVMNIMIIQNYTRTTDNQALIKESLQSVQQQIKALTDKIGTEIGPKVSLIDTSSTITIPANIGLLGSKISQSTSSINENVNDKCKFTLPPLKIHECNISCPNPLPFREYRPISQGVSDLVGLPNQICLQKTTSTILKPRLISYTLPINTREGVCITDPLLAVDNGFFAYSHLEKIGSCTRGIAKQRIIGVGEVLDRGDKVPSMFMTNVWTPPNPSTIHHCSSTYHEDFYYTLCAVSHVGDPILNSTSWTESLSLIRLAVRPKSDSGDYNQKYIAITKVERGKYDKVMPYGPSGIKQGDTLYFPAVGFLPRTEFQYNDSNCPIIHCKYSKAENCRLSMGVNSKSHYILRSGLLKYNLSLGGDIILQFIEIADNRLTIGSPSKIYNSLGQPVFYQASYSWDTMIKLGDVDTVDPLRVQWRNNSVISRPGQSQCPRFNVCPEVCWEGTYNDAFLIDRLNWVSAGVYLNSNQTAENPVFAVFKDNEILYQVPLAEDDTNAQKTITDCFLLENVIWCISLVEIYDTGDSVIRPKLFAVKIPAQCSES

SEQ ID NO: 9276 - protein, 526 aa, synthetic construct
MVVILDKRCYCNLLILILMISECSVGILHYEKLSKIGLVKGVTRKYKIKSNPLTKDIVIKMIPNVSNMSQCTGSVMENYKTRLNGILTPIKGALEIYKNNTHDLVGDVRLAGVIMAGVAIGIATAAQITAGVALYEAMKNADNINKLKSSIESTNEAVVKLQETAEKTVYVLTALQDYINTNLVPTIDKISCKQTELSLDLALSKYLSDLLFVFGPNLQDPVSNSMTIQAISQAFGGNYETLLRTLGYATEDFDDLLESDSITGQIIYVDLSSYYIIVRVYFPILTEIQQAYIQELLPVSFNNDNSEWISIVPNFILVRNTLISNIEIGFCLITKRSVICNQDYATPMTNNMRECLTGSTEKCPRELVVSSHVPRFALSNGVLFANCISVTCQCQTTGRAISQSGEQTLLMIDNTTCPTAVLGNVIISLGKYLGSVNYNSEGIAIGPPVFTDKVDISSQISSMNQSLQQSKDYIKEAQRLLDTVNPSLISMLSMIILYVLSIASLCIGLITFISFIIVEKKRNTGT

SEQ ID NO: 9277 - protein, 526 aa, synthetic construct
MVVILDKRCYCNLLILILMISECSVGILHYEKLSKIGLVKGVTRKYKIKSNPLTKDIVIKMIPNVSNMSQCTGSVMENYKTRLNGILTPIKGALEIYKNQTHDLVGDVRLAGVIMAGVAIGIATAAQITAGVALYEAMKNADNINKLKSSIESTNEAVVKLQETAEKTVYVLTALQDYINTNLVPTIDKISCKQTELSLDLALSKYLSDLLFVFGPNLQDPVSNSMTIQAISQAFGGNYETLLRTLGYATEDFDDLLESDSITGQIIYVDLSSYYIIVRVYFPILTEIQQAYIQELLPVSFNNDNSEWISIVPNFILVRNTLISNIEIGFCLITKRSVICNQDYATPMTNNMRECLTGSTEKCPRELVVSSHVPRFALSNGVLFANCISVTCQCQTTGRAISQSGEQTLLMIDNTTCPTAVLGNVIISLGKYLGSVNYNSEGIAIGPPVFTDKVDISSQISSMNQSLQQSKDYIKEAQRLLDTVNPSLISMLSMIILYVLSIASLCIGLITFISFIIVEKKRNTGT

SEQ ID NO: 9278 - protein, 524 aa, synthetic construct; identical to SEQ ID NO: 9265

SEQ ID NO: 9279 - protein, 569 aa, synthetic construct
MKKINEGLLDSKILSAFNTVIALLGSIVIIVMNIMIIQNYTRSTDNQAVIKDALQGIQQQIKGLADKIGTEIGPKVSLIDTSSTITIPANIGLLGSKISQSTASINENVNEKCKFTLPPLKIHECNISCPNPLPFREYRPQTEGVSNLVGLPNNICLQKTSNQILKPKLISYTLPVVGQSGTCITDPLLAMDEGYFAYSHLERIGSCSRGVSKQRIIGVGEVLDRGDEVPSLFMTNVWTPPNPNTVYHCSAVYNNEFYYVLCAVSTVGDPILNSTYWSGSLMMTRLAVKPKSNGGGYNQHQLALRSIEKGRYDKVMPYGPSGIKQGDTLYFPAVGFLVRTEFKYNDSNCPITKCQYSKPENCRLSMGIRPNSHYILRSGLLKYNLSDGENPKVVFIEISDQRLSIGSPSKIYDSLGQPVFYQASFSWDTMIKFGDVLTVNPLVVNWRNNTVISRPGQSQCPRFNTCPEICWEGVYNDAFLIDRINWISAGVFLDSNQTAENPVFTVFKDNEILYRAQLASEDTNAQKTITNCFLLKNKIWCISLVEIYDTGDNVIRPKLFAVKIPEQCT

SEQ ID NO: 9280 - protein, 498 aa, synthetic construct
ILHYEKLSKIGLVKGVTRKYKIKSNPLTKDIVIKMIPNVSNMSQCTGSVMENYKTRLNGILTPIKGALEIYKNNTHDLVGDVRLAGVIMAGVAIGIATAAQITAGVALYEAMKNADNINKLKSSIESTNEAVVKLQETAEKTVYVLTALQDYINTNLVPTIDKISCKQTELSLDLALSKYLSDLLFVFGPNLQDPVSNSMTIQAISQAFGGNYETLLRTLGYATEDFDDLLESDSITGQIIYVDLSSYYIIVRVYFPILTEIQQAYIQELLPVSFNNDNSEWISIVPNFILVRNTLISNIEIGFCLITKRSVICNQDYATPMTNNMRECLTGSTEKCPRELVVSSHVPRFALSNGVLFANCISVTCQCQTTGRAISQSGEQTLLMIDNTTCPTAVLGNVIISLGKYLGSVNYNSEGIAIGPPVFTDKVDISSQISSMNQSLQQSKDYIKEAQRLLDTVNPSLISMLSMIILYVLSIASLCIGLITFISFIIVEKKRNT

SEQ ID NO: 9281 - protein, 557 aa, synthetic construct
MSNKRTTVLIIISYTLFYLNNAAIVGFDFDKLNKIGVVQGRVLNYKIKGDPMTKDLVLKFIPNIVNITECVREPLSRYNETVRRLLLPIHNMLGLYLNNTNAKMTGLMIAGVIMGGIAIGIATAAQITAGFALYEAKKNTENIQKLTDSIMKTQDSIDKLTDSVGTSILILNKLQTYINNQLVPNLELLSCRQNKIEFDLMLTKYLVDLMTVIGPNINNPVNKDMTIQSLSLLFDGNYDIMMSELGYTPQDFLDLIESKSITGQIIYVDMENLYVVIRTYLPTLIEVPDAQIYEFNKITMSSNGGEYLSTIPNFILIRGNYMSNIDVATCYMTKASVICNQDYSLPMSQNLRSCYQGETEYCPVEAVIASHSPRFALTNGVIFANCINTICRCQDNGKTITQNINQFVSMIDNSTCNDVMVDKFTIKVGKYMGRKDINNINIQIGPQIIIDKVDLSNEINKMNQSLKDSIFYLREAKRILDSVNISLISPSVQLFLIIISVLSFIILLIIIVYLYCKSKHSYKYNKFIDDPDYYNDYKRERINGKASKSNNIYYVGD

SEQ ID NO: 9282 - protein, 545 aa, synthetic construct
MALNKNMFSSLFLGYLLVYATTVQSSIHYDSLSKVGVIKGLTYNYKIKGSPSTKLMVVKLIPNIDSVKNCTQKQYDEYKNLVRKALEPVKMAIDTMLNNVKSGNNKYRFAGAIMAGVALGVATAATVTAGIALHRSNENAQAIANMKSAIQNTNEAVKQLQLANKQTLAVIDTIRGEINNNIIPVINQLSCDTIGLSVGIRLTQYYSEIITAFGPALQNPVNTRITIQAISSVFNGNFDELLKIMGYTSGDLYEILHSELIRGNIIDVDVDAGYIALEIEFPNLTLVPNAVVQELMPISYNIDGDEWVTLVPRFVLTRTTLLSNIDTSRCTITDSSVICDNDYALPMSHELIGCLQGDTSKCAREKVVSSYVPKFALSDGLVYANCLNTICRCMDTDTPISQSLGATVSLLDNKRCSVYQVGDVLISVGSYLGDGEYNADNVELGPPIVIDKIDIGNQLAGINQTLQEAEDYIEKSEEFLKGVNPSIITLGSMVVLYIFMILIAIVSVIALVLSIKLTVKGNVVRQQFTYTQHVPSMENINYVSH

SEQ ID NO: 9283 - protein, 662 aa, synthetic construct
MKKKTDNPTISKRGHNHSRGIKSRALLRETDNYSNGLIVENLVRNCHHPSKNNLNYTKTQKRDSTIPYRVEERKGHYPKIKHLIDKSYKHIKRGKRRNGHNGNIITIILLLILILKTQMSEGAIHYETLSKIGLIKGITREYKVKGTPSSKDIVIKLIPNVTGLNKCTNISMENYKEQLDKILIPINNIIELYANSTKSAPGNARFAGVIIAGVALGVAAAAQITAGIALHEARQNAERINLLKDSISATNNAVAELQEATGGIVNVITGMQDYINTNLVPQIDKLQCSQIKTALDISLSQYYSEILTVFGPNLQNPVTTSMSIQAISQSFGGNIDLLLNLLGYTANDLLDLLESKSITGQITYINLEHYFMVIRVYYPIMTTISNAYVQELIKISFNVDGSEWVSLVPSYILIRNSYLSNIDISECLITKNSVICRHDFAMPMSYTLKECLTGDTEKCPREAVVTSYVPRFAISGGVIYANCLSTTCQCYQTGKVIAQDGSQTLMMIDNQTCSIVRIEEILISTGKYLGSQEYNTMHVSVGNPVFTDKLDITSQISNINQSIEQSKFYLDKSKAILDKINLNLIGSVPISILFIIAILSLILSIITFVIVMIIVRRYNKYTPLINSDPSSRRSTIQDVYIIPNPGEHSIRSAARSIDRDRD

SEQ ID NO: 9284 - protein, 36 aa, synthetic construct
  VARIANT 1..36: note = This sequence may encompass 1-6 GGGGGS repeating units
GGGGGSGGGGGSGGGGGSGGGGGSGGGGGSGGGGGS

SEQ ID NO: 9285 - protein, 602 aa, Nipah henipavirus
MPAENKKVRFENTTSDKGKIPSKVIKSYYGTMDIKKINEGLLDSKILSAFNTVIALLGSIVIIVMNIMIIQNYTRSTDNQAVIKDALQGIQQQIKGLADKIGTEIGPKVSLIDTSSTITIPANIGLLGSKISQSTASINENVNEKCKFTLPPLKIHECNISCPNPLPFREYRPQTEGVSNLVGLPNNICLQKTSNQILKPKLISYTLPVVGQSGTCITDPLLAMDEGYFAYSHLERIGSCSRGVSKQRIIGVGEVLDRGDEVPSLFMTNVWTPPNPNTVYHCSAVYNNEFYYVLCAVSTVGDPILNSTYWSGSLMMTRLAVKPKSNGGGYNQHQLALRSIEKGRYDKVMPYGPSGIKQGDTLYFPAVGFLVRTEFKYNDSNCPITKCQYSKPENCRLSMGIRPNSHYILRSGLLKYNLSDGENPKVVFIEISDQRLSIGSPSKIYDSLGQPVFYQASFSWDTMIKFGDVLTVNPLVVNWRNNTVISRPGQSQCPRFNTCPEICWEGVYNDAFLIDRINWISAGVFLDSNQTAENPVFTVFKDNEILYRAQLASEDTNAQKTITNCFLLKNKIWCISLVEIYDTGDNVIRPKLFAVKIPEQCT

SEQ ID NO: 9286 - protein, 622 aa, Cedar henipavirus
MLSQLQKNYLDNSNQQGDKMNNPDKKLSVNFNPLELDKGQKDLNKSYYVKNKNYNVSNLLNESLHDIKFCIYCIFSLLIIITIINIITISIVITRLKVHEENNGMESPNLQSIQDSLSSLTNMINTEITPRIGILVTATSVTLSSSINYVGTKTNQLVNELKDYITKSCGFKVPELKLHECNISCADPKISKSAMYSTNAYAELAGPPKIFCKSVSKDPDFRLKQIDYVIPVQQDRSICMNNPLLDISDGFFTYIHYEGINSCKKSDSFKVLLSHGEIVDRGDYRPSLYLLSSHYHPYSMQVINCVPVTCNQSSFVFCHISNNTKTLDNSDYSSDEYYITYFNGIDRPKTKKIPINNMTADNRYIHFTFSGGGGVCLGEEFIIPVTTVINTDVFTHDYCESFNCSVQTGKSLKEICSESLRSPTNSSRYNLNGIMIISQNNMTDFKIQLNGITYNKLSFGSPGRLSKTLGQVLYYQSSMSWDTYLKAGFVEKWKPFTPNWMNNTVISRPNQGNCPRYHKCPEICYGGTYNDIAPLDLGKDMYVSVILDSDQLAENPEITVFNSTTILYKERVSKDELNTRSTTTSCFLFLDEPWCISVLETNRFNGKSIRPEIYSYKIPKYC

SEQ ID NO: 9287 - protein, 632 aa, synthetic construct
MPQKTVEFINMNSPLERGVSTLSDKKTLNQSKITKQGYFGLGSHSERNWKKQKNQNDHYMTVSTMILEILVVLGIMFNLIVLTMVYYQNDNINQRMAELTSNITVLNLNLNQLTNKIQREIIPRITLIDTATTITIPSAITYILATLTTRISELLPSINQKCEFKTPTLVLNDCRINCTPPLNPSDGVKMSSLATNLVAHGPSPCRNFSSVPTIYYYRIPGLYNRTALDERCILNPRLTISSTKFAYVHSEYDKNCTRGFKYYELMTFGEILEGPEKEPRMFSRSFYSPTNAVNYHSCTPIVTVNEGYFLCLECTSSDPLYKANLSNSTFHLVILRHNKDEKIVSMPSFNLSTDQEYVQIIPAEGGGTAESGNLYFPCIGRLLHKRVTHPLCKKSNCSRTDDESCLKSYYNQGSPQHQVVNCLIRIRNAQRDNPTWDVITVDLTNTYPGSRSRIFGSFSKPMLYQSSVSWHTLLQVAEITDLDKYQLDWLDTPYISRPGGSECPFGNYCPTVCWEGTYNDVYSLTPNNDLFVTVYLKSEQVAENPYFAIFSRDQILKEFPLDAWISSARTTTISCFMFNNEIWCIAALEITRLNDDIIRPIYYSFWLPTDCRTPYPHTGKMTRVPLRSTYNY

SEQ ID NO: 9288 - protein, 625 aa, Mojiang henipavirus
MATNRDNTITSAEVSQEDKVKKYYGVETAEKVADSISGNKVFILMNTLLILTGAIITITLNITNLTAAKSQQNMLKIIQDDVNAKLEMFVNLDQLVKGEIKPKVSLINTAVSVSIPGQISNLQTKFLQKYVYLEESITKQCTCNPLSGIFPTSGPTYPPTDKPDDDTTDDDKVDTTIKPIEYPKPDGCNRTGDHFTMEPGANFYTVPNLGPASSNSDECYTNPSFSIGSSIYMFSQEIRKTDCTAGEILSIQIVLGRIVDKGQQGPQASPLLVWAVPNPKIINSCAVAAGDEMGWVLCSVTLTAASGEPIPHMFDGFWLYKLEPDTEVVSYRITGYAYLLDKQYDSVFIGKGGGIQKGNDLYFQMYGLSRNRQSFKALCEHGSCLGTGGGGYQVLCDRAVMSFGSEESLITNAYLKVNDLASGKPVIIGQTFPPSDSYKGSNGRMYTIGDKYGLYLAPSSWNRYLRFGITPDISVRSTTWLKSQDPIMKILSTCTNTDRDMCPEICNTRGYQDIFPLSEDSEYYTYIGITPNNGGTKNFVAVRDSDGHIASIDILQNYYSITSATISCFMYKDEIWCIAITEGKKQKDNPQRIYAHSYKIRQMCYNMKSATVTVGNAKNITIRRY

SEQ ID NO: 9289 - protein, 552 aa, Nipah henipavirus
FNTVIALLGSIVIIVMNIMIIQNYTRSTDNQAVIKDALQGIQQQIKGLADKIGTEIGPKVSLIDTSSTITIPANIGLLGSKISQSTASINENVNEKCKFTLPPLKIHECNISCPNPLPFREYRPQTEGVSNLVGLPNNICLQKTSNQILKPKLISYTLPVVGQSGTCITDPLLAMDEGYFAYSHLERIGSCSRGVSKQRIIGVGEVLDRGDEVPSLFMTNVWTPPNPNTVYHCSAVYNNEFYYVLCAVSTVGDPILNSTYWSGSLMMTRLAVKPKSNGGGYNQHQLALRSIEKGRYDKVMPYGPSGIKQGDTLYFPAVGFLVRTEFKYNDSNCPITKCQYSKPENCRLSMGIRPNSHYILRSGLLKYNLSDGENPKVVFIEISDQRLSIGSPSKIYDSLGQPVFYQASFSWDTMIKFGDVLTVNPLVVNWRNNTVISRPGQSQCPRFNTCPEICWEGVYNDAFLIDRINWISAGVFLDSNQTAENPVFTVFKDNEILYRAQLASEDTNAQKTITNCFLLKNKIWCISLVEIYDTGDNVIRPKLFAVKIPEQC

SEQ ID NO: 9290 - protein, 555 aa, Hendra henipavirus
FNTVIALLGSIIIIVMNIMIIQNYTRTTDNQALIKESLQSVQQQIKALTDKIGTEIGPKVSLIDTSSTITIPANIGLLGSKISQSTSSINENVNDKCKFTLPPLKIHECNISCPNPLPFREYRPISQGVSDLVGLPNQICLQKTTSTILKPRLISYTLPINTREGVCITDPLLAVDNGFFAYSHLEKIGSCTRGIAKQRIIGVGEVLDRGDKVPSMFMTNVWTPPNPSTIHHCSSTYHEDFYYTLCAVSHVGDPILNSTSWTESLSLIRLAVRPKSDSGDYNQKYIAITKVERGKYDKVMPYGPSGIKQGDTLYFPAVGFLPRTEFQYNDSNCPIIHCKYSKAENCRLSMGVNSKSHYILRSGLLKYNLSLGGDIILQFIEIADNRLTIGSPSKIYNSLGQPVFYQASYSWDTMIKLGDVDTVDPLRVQWRNNSVISRPGQSQCPRFNVCPEVCWEGTYNDAFLIDRLNWVSAGVYLNSNQTAENPVFAVFKDNEILYQVPLAEDDTNAQKTITDCFLLENVIWCISLVEIYDTGDSVIRPKLFAVKIPAQCSES

SEQ ID NO: 9291 - protein, 26 aa, unidentified
MVVILDKRCYCNLLILILMISECSVG

SEQ ID NO: 9292 - protein, 6 aa, synthetic construct
GGGGGS

SEQ ID NO: 9293 - protein, 50 aa, synthetic construct
  VARIANT 1..50: note = This sequence may encompass 1-10 GGGGS repeating units
GGGGSGGGGSGGGGSGGGGSGGGGSGGGGSGGGGSGGGGSGGGGSGGGGS

SEQ ID NO: 9294 - protein, 5 aa, synthetic construct
GGGGS

SEQ ID NO: 9295 - protein, 600 aa, synthetic construct
PAENKKVRFENTTSDKGKIPSKVIKSYYGTMDIKKINEGLLDSKILSAFNTVIALLGSIVIIVMNIMIIQNYTRSTDNQAVIKDALQGIQQQIKGLADKIGTEIGPKVSLIDTSSTITIPANIGLLGSKISQSTASINENVNEKCKFTLPPLKIHECNISCPNPLPFREYRPQTEGVSNLVGLPNNICLQKTSNQILKPKLISYTLPVVGQSGTCITDPLLAMDEGYFAYSHLERIGSCSRGVSKQRIIGVGEVLDRGDEVPSLFMTNVWTPPNPNTVYHCSAVYNNEFYYVLCAVSTVGDPILNSTYWSGSLMMTRLAVKPKSNGGGYNQHQLALRSIEKGRYDKVMPYGPSGIKQGDTLYFPAVGFLVRTEFKYNDSNCPITKCQYSKPENCRLSMGIRPNSHYILRSGLLKYNLSDGENPKVVFIEISDQRLSIGSPSKIYDSLGQPVFYQASFSWDTMIKFGDVLTVNPLVVNWRNNTVISRPGQSQCPRFNTCPEICWEGVYNDAFLIDRINWISAGVFLDSNQTAENPVFTVFKDNEILYRAQLASEDTNAQKTITNCFLLKNKIWCISLVEIYDTGDNVIRPKLFAVKIPEQC

SEQ ID NO: 9296 - protein, 595 aa, synthetic construct
KVRFENTTSDKGKIPSKVIKSYYGTMDIKKINEGLLDSKILSAFNTVIALLGSIVIIVMNIMIIQNYTRSTDNQAVIKDALQGIQQQIKGLADKIGTEIGPKVSLIDTSSTITIPANIGLLGSKISQSTASINENVNEKCKFTLPPLKIHECNISCPNPLPFREYRPQTEGVSNLVGLPNNICLQKTSNQILKPKLISYTLPVVGQSGTCITDPLLAMDEGYFAYSHLERIGSCSRGVSKQRIIGVGEVLDRGDEVPSLFMTNVWTPPNPNTVYHCSAVYNNEFYYVLCAVSTVGDPILNSTYWSGSLMMTRLAVKPKSNGGGYNQHQLALRSIEKGRYDKVMPYGPSGIKQGDTLYFPAVGFLVRTEFKYNDSNCPITKCQYSKPENCRLSMGIRPNSHYILRSGLLKYNLSDGENPKVVFIEISDQRLSIGSPSKIYDSLGQPVFYQASFSWDTMIKFGDVLTVNPLVVNWRNNTVISRPGQSQCPRFNTCPEICWEGVYNDAFLIDRINWISAGVFLDSNQTAENPVFTVFKDNEILYRAQLASEDTNAQKTITNCFLLKNKIWCISLVEIYDTGDNVIRPKLFAVKIPEQC

SEQ ID NO: 9297 - protein, 590 aa, synthetic construct
NTTSDKGKIPSKVIKSYYGTMDIKKINEGLLDSKILSAFNTVIALLGSIVIIVMNIMIIQNYTRSTDNQAVIKDALQGIQQQIKGLADKIGTEIGPKVSLIDTSSTITIPANIGLLGSKISQSTASINENVNEKCKFTLPPLKIHECNISCPNPLPFREYRPQTEGVSNLVGLPNNICLQKTSNQILKPKLISYTLPVVGQSGTCITDPLLAMDEGYFAYSHLERIGSCSRGVSKQRIIGVGEVLDRGDEVPSLFMTNVWTPPNPNTVYHCSAVYNNEFYYVLCAVSTVGDPILNSTYWSGSLMMTRLAVKPKSNGGGYNQHQLALRSIEKGRYDKVMPYGPSGIKQGDTLYFPAVGFLVRTEFKYNDSNCPITKCQYSKPENCRLSMGIRPNSHYILRSGLLKYNLSDGENPKVVFIEISDQRLSIGSPSKIYDSLGQPVFYQASFSWDTMIKFGDVLTVNPLVVNWRNNTVISRPGQSQCPRFNTCPEICWEGVYNDAFLIDRINWISAGVFLDSNQTAENPVFTVFKDNEILYRAQLASEDTNAQKTITNCFLLKNKIWCISLVEIYDTGDNVIRPKLFAVKIPEQC

SEQ ID NO: 9298 - protein, 585 aa, synthetic construct
KGKIPSKVIKSYYGTMDIKKINEGLLDSKILSAFNTVIALLGSIVIIVMNIMIIQNYTRSTDNQAVIKDALQGIQQQIKGLADKIGTEIGPKVSLIDTSSTITIPANIGLLGSKISQSTASINENVNEKCKFTLPPLKIHECNISCPNPLPFREYRPQTEGVSNLVGLPNNICLQKTSNQILKPKLISYTLPVVGQSGTCITDPLLAMDEGYFAYSHLERIGSCSRGVSKQRIIGVGEVLDRGDEVPSLFMTNVWTPPNPNTVYHCSAVYNNEFYYVLCAVSTVGDPILNSTYWSGSLMMTRLAVKPKSNGGGYNQHQLALRSIEKGRYDKVMPYGPSGIKQGDTLYFPAVGFLVRTEFKYNDSNCPITKCQYSKPENCRLSMGIRPNSHYILRSGLLKYNLSDGENPKVVFIEISDQRLSIGSPSKIYDSLGQPVFYQASFSWDTMIKFGDVLTVNPLVVNWRNNTVISRPGQSQCPRFNTCPEICWEGVYNDAFLIDRINWISAGVFLDSNQTAENPVFTVFKDNEILYRAQLASEDTNAQKTITNCFLLKNKIWCISLVEIYDTGDNVIRPKLFAVKIPEQC

SEQ ID NO: 9299 - protein, 580 aa, synthetic construct
SKVIKSYYGTMDIKKINEGLLDSKILSAFNTVIALLGSIVIIVMNIMIIQNYTRSTDNQAVIKDALQGIQQQIKGLADKIGTEIGPKVSLIDTSSTITIPANIGLLGSKISQSTASINENVNEKCKFTLPPLKIHECNISCPNPLPFREYRPQTEGVSNLVGLPNNICLQKTSNQILKPKLISYTLPVVGQSGTCITDPLLAMDEGYFAYSHLERIGSCSRGVSKQRIIGVGEVLDRGDEVPSLFMTNVWTPPNPNTVYHCSAVYNNEFYYVLCAVSTVGDPILNSTYWSGSLMMTRLAVKPKSNGGGYNQHQLALRSIEKGRYDKVMPYGPSGIKQGDTLYFPAVGFLVRTEFKYNDSNCPITKCQYSKPENCRLSMGIRPNSHYILRSGLLKYNLSDGENPKVVFIEISDQRLSIGSPSKIYDSLGQPVFYQASFSWDTMIKFGDVLTVNPLVVNWRNNTVISRPGQSQCPRFNTCPEICWEGVYNDAFLIDRINWISAGVFLDSNQTAENPVFTVFKDNEILYRAQLASEDTNAQKTITNCFLLKNKIWCISLVEIYDTGDNVIRPKLFAVKIPEQC

SEQ ID NO: 9300 - protein, 575 aa, synthetic construct
SYYGTMDIKKINEGLLDSKILSAFNTVIALLGSIVIIVMNIMIIQNYTRSTDNQAVIKDALQGIQQQIKGLADKIGTEIGPKVSLIDTSSTITIPANIGLLGSKISQSTASINENVNEKCKFTLPPLKIHECNISCPNPLPFREYRPQTEGVSNLVGLPNNICLQKTSNQILKPKLISYTLPVVGQSGTCITDPLLAMDEGYFAYSHLERIGSCSRGVSKQRIIGVGEVLDRGDEVPSLFMTNVWTPPNPNTVYHCSAVYNNEFYYVLCAVSTVGDPILNSTYWSGSLMMTRLAVKPKSNGGGYNQHQLALRSIEKGRYDKVMPYGPSGIKQGDTLYFPAVGFLVRTEFKYNDSNCPITKCQYSKPENCRLSMGIRPNSHYILRSGLLKYNLSDGENPKVVFIEISDQRLSIGSPSKIYDSLGQPVFYQASFSWDTMIKFGDVLTVNPLVVNWRNNTVISRPGQSQCPRFNTCPEICWEGVYNDAFLIDRINWISAGVFLDSNQTAENPVFTVFKDNEILYRAQLASEDTNAQKTITNCFLLKNKIWCISLVEIYDTGDNVIRPKLFAVKIPEQC

SEQ ID NO: 9301 - protein, 571 aa, synthetic construct
TMDIKKINEGLLDSKILSAFNTVIALLGSIVIIVMNIMIIQNYTRSTDNQAVIKDALQGIQQQIKGLADKIGTEIGPKVSLIDTSSTITIPANIGLLGSKISQSTASINENVNEKCKFTLPPLKIHECNISCPNPLPFREYRPQTEGVSNLVGLPNNICLQKTSNQILKPKLISYTLPVVGQSGTCITDPLLAMDEGYFAYSHLERIGSCSRGVSKQRIIGVGEVLDRGDEVPSLFMTNVWTPPNPNTVYHCSAVYNNEFYYVLCAVSTVGDPILNSTYWSGSLMMTRLAVKPKSNGGGYNQHQLALRSIEKGRYDKVMPYGPSGIKQGDTLYFPAVGFLVRTEFKYNDSNCPITKCQYSKPENCRLSMGIRPNSHYILRSGLLKYNLSDGENPKVVFIEISDQRLSIGSPSKIYDSLGQPVFYQASFSWDTMIKFGDVLTVNPLVVNWRNNTVISRPGQSQCPRFNTCPEICWEGVYNDAFLIDRINWISAGVFLDSNQTAENPVFTVFKDNEILYRAQLASEDTNAQKTITNCFLLKNKIWCISLVEIYDTGDNVIRPKLFAVKIPEQC

SEQ ID NO: 9302 - protein, 568 aa, synthetic construct
KKINEGLLDSKILSAFNTVIALLGSIVIIVMNIMIIQNYTRSTDNQAVIKDALQGIQQQIKGLADKIGTEIGPKVSLIDTSSTITIPANIGLLGSKISQSTASINENVNEKCKFTLPPLKIHECNISCPNPLPFREYRPQTEGVSNLVGLPNNICLQKTSNQILKPKLISYTLPVVGQSGTCITDPLLAMDEGYFAYSHLERIGSCSRGVSKQRIIGVGEVLDRGDEVPSLFMTNVWTPPNPNTVYHCSAVYNNEFYYVLCAVSTVGDPILNSTYWSGSLMMTRLAVKPKSNGGGYNQHQLALRSIEKGRYDKVMPYGPSGIKQGDTLYFPAVGFLVRTEFKYNDSNCPITKCQYSKPENCRLSMGIRPNSHYILRSGLLKYNLSDGENPKVVFIEISDQRLSIGSPSKIYDSLGQPVFYQASFSWDTMIKFGDVLTVNPLVVNWRNNTVISRPGQSQCPRFNTCPAICAEGVYNDAFLIDRINWISAGVFLDSNATAANPVFTVFKDNEILYRAQLASEDTNAQKTITNCFLLKNKIWCISLVEIYDTGDNVIRPKLFAVKIPEQCT

SEQ ID NO: 9303 - protein, 603 aa, synthetic construct
MADSKLVSLNNNLSGKIKDQGKVIKNYYGTMDIKKINDGLLDSKILGAFNTVIALLGSIIIIVMNIMIIQNYTRTTDNQALIKESLQSVQQQIKALTDKIGTEIGPKVSLIDTSSTITIPANIGLLGSKISQSTSSINENVNDKCKFTLPPLKIHECNISCPNPLPFREYRPISQGVSDLVGLPNQICLQKTTSTILKPRLISYTLPINTREGVCITDPLLAVDNGFFAYSHLEKIGSCTRGIAKQRIIGVGEVLDRGDKVPSMFMTNVWTPPNPSTIHHCSSTYHEDFYYTLCAVSHVGDPILNSTSWTESLSLIRLAVRPKSDSGDYNQKYIAITKVERGKYDKVMPYGPSGIKQGDTLYFPAVGFLPRTEFQYNDSNCPIIHCKYSKAENCRLSMGVNSKSHYILRSGLLKYNLSLGGDIILQFIEIADNRLTIGSPSKIYNSLGQPVFYQASYSWDTMIKLGDVDTVDPLRVQWRNNSVISRPGQSQCPRFNVCPEVCWEGTYNDAFLIDRLNWVSAGVYLNSNQTAENPVFAVFKDNEILYQVPLAEDDTNAQKTITDCFLLENVIWCISLVEIYDTGDSVIRPKLFAVKIPAQCSES

SEQ ID NO: 9304 - protein, 568 aa, synthetic construct
KKINEGLLDSKILSAFNTVIALLGSIVIIVMNIMIIQNYTRSTDNQAVIKDALQGIQQQIKGLADKIGTEIGPKVSLIDTSSTITIPANIGLLGSKISQSTASINENVNEKCKFTLPPLKIHECNISCPNPLPFREYRPQTEGVSNLVGLPNNICLQKTSNQILKPKLISYTLPVVGQSGTCITDPLLAMDEGYFAYSHLERIGSCSRGVSKQRIIGVGEVLDRGDEVPSLFMTNVWTPPNPNTVYHCSAVYNNEFYYVLCAVSTVGDPILNSTYWSGSLMMTRLAVKPKSNGGGYNQHQLALRSIEKGRYDKVMPYGPSGIKQGDTLYFPAVGFLVRTEFKYNDSNCPITKCQYSKPENCRLSMGIRPNSHYILRSGLLKYNLSDGENPKVVFIEISDQRLSIGSPSKIYDSLGQPVFYQASFSWDTMIKFGDVLTVNPLVVNWRNNTVISRPGQSQCPRFNTCPEICWEGVYNDAFLIDRINWISAGVFLDSNQTAENPVFTVFKDNEILYRAQLASEDTNAQKTITNCFLLKNKIWCISLVEIYDTGDNVIRPKLFAVKIPEQCT

SEQ ID NO: 9305 - protein, 621 aa, synthetic construct
LSQLQKNYLDNSNQQGDKMNNPDKKLSVNFNPLELDKGQKDLNKSYYVKNKNYNVSNLLNESLHDIKFCIYCIFSLLIIITIINIITISIVITRLKVHEENNGMESPNLQSIQDSLSSLTNMINTEITPRIGILVTATSVTLSSSINYVGTKTNQLVNELKDYITKSCGFKVPELKLHECNISCADPKISKSAMYSTNAYAELAGPPKIFCKSVSKDPDFRLKQIDYVIPVQQDRSICMNNPLLDISDGFFTYIHYEGINSCKKSDSFKVLLSHGEIVDRGDYRPSLYLLSSHYHPYSMQVINCVPVTCNQSSFVFCHISNNTKTLDNSDYSSDEYYITYFNGIDRPKTKKIPINNMTADNRYIHFTFSGGGGVCLGEEFIIPVTTVINTDVFTHDYCESFNCSVQTGKSLKEICSESLRSPTNSSRYNLNGIMIISQNNMTDFKIQLNGITYNKLSFGSPGRLSKTLGQVLYYQSSMSWDTYLKAGFVEKWKPFTPNWMNNTVISRPNQGNCPRYHKCPEICYGGTYNDIAPLDLGKDMYVSVILDSDQLAENPEITVFNSTTILYKERVSKDELNTRSTTTSCFLFLDEPWCISVLETNRFNGKSIRPEIYSYKIPKYC

SEQ ID NO: 9306 - protein, 631 aa, synthetic construct
PQKTVEFINMNSPLERGVSTLSDKKTLNQSKITKQGYFGLGSHSERNWKKQKNQNDHYMTVSTMILEILVVLGIMFNLIVLTMVYYQNDNINQRMAELTSNITVLNLNLNQLTNKIQREIIPRITLIDTATTITIPSAITYILATLTTRISELLPSINQKCEFKTPTLVLNDCRINCTPPLNPSDGVKMSSLATNLVAHGPSPCRNFSSVPTIYYYRIPGLYNRTALDERCILNPRLTISSTKFAYVHSEYDKNCTRGFKYYELMTFGEILEGPEKEPRMFSRSFYSPTNAVNYHSCTPIVTVNEGYFLCLECTSSDPLYKANLSNSTFHLVILRHNKDEKIVSMPSFNLSTDQEYVQIIPAEGGGTAESGNLYFPCIGRLLHKRVTHPLCKKSNCSRTDDESCLKSYYNQGSPQHQVVNCLIRIRNAQRDNPTWDVITVDLTNTYPGSRSRIFGSFSKPMLYQSSVSWHTLLQVAEITDLDKYQLDWLDTPYISRPGGSECPFGNYCPTVCWEGTYNDVYSLTPNNDLFVTVYLKSEQVAENPYFAIFSRDQILKEFPLDAWISSARTTTISCFMFNNEIWCIAALEITRLNDDIIRPIYYSFWLPTDCRTPYPHTGKMTRVPLRSTYNY

SEQ ID NO: 9307 - protein, 624 aa, synthetic construct
ATNRDNTITSAEVSQEDKVKKYYGVETAEKVADSISGNKVFILMNTLLILTGAIITITLNITNLTAAKSQQNMLKIIQDDVNAKLEMFVNLDQLVKGEIKPKVSLINTAVSVSIPGQISNLQTKFLQKYVYLEESITKQCTCNPLSGIFPTSGPTYPPTDKPDDDTTDDDKVDTTIKPIEYPKPDGCNRTGDHFTMEPGANFYTVPNLGPASSNSDECYTNPSFSIGSSIYMFSQEIRKTDCTAGEILSIQIVLGRIVDKGQQGPQASPLLVWAVPNPKIINSCAVAAGDEMGWVLCSVTLTAASGEPIPHMFDGFWLYKLEPDTEVVSYRITGYAYLLDKQYDSVFIGKGGGIQKGNDLYFQMYGLSRNRQSFKALCEHGSCLGTGGGGYQVLCDRAVMSFGSEESLITNAYLKVNDLASGKPVIIGQTFPPSDSYKGSNGRMYTIGDKYGLYLAPSSWNRYLRFGITPDISVRSTTWLKSQDPIMKILSTCTNTDRDMCPEICNTRGYQDIFPLSEDSEYYTYIGITPNNGGTKNFVAVRDSDGHIASIDILQNYYSITSATISCFMYKDEIWCIAITEGKKQKDNPQRIYAHSYKIRQMCYNMKSATVTVGNAKNITIRRY

SEQ ID NO: 9308 - protein, 530 aa, synthetic construct
DFDKLNKIGVVQGRVLNYKIKGDPMTKDLVLKFIPNIVNITECVREPLSRYNETVRRLLLPIHNMLGLYLNNTNAKMTGLMIAGVIMGGIAIGIATAAQITAGFALYEAKKNTENIQKLTDSIMKTQDSIDKLTDSVGTSILILNKLQTYINNQLVPNLELLSCRQNKIEFDLMLTKYLVDLMTVIGPNINNPVNKDMTIQSLSLLFDGNYDIMMSELGYTPQDFLDLIESKSITGQIIYVDMENLYVVIRTYLPTLIEVPDAQIYEFNKITMSSNGGEYLSTIPNFILIRGNYMSNIDVATCYMTKASVICNQDYSLPMSQNLRSCYQGETEYCPVEAVIASHSPRFALTNGVIFANCINTICRCQDNGKTITQNINQFVSMIDNSTCNDVMVDKFTIKVGKYMGRKDINNINIQIGPQIIIDKVDLSNEINKMNQSLKDSIFYLREAKRILDSVNISLISPSVQLFLIIISVLSFIILLIIIVYLYCKSKHSYKYNKFIDDPDYYNDYKRERINGKASKSNNIYYVGD

SEQ ID NO: 9309 - protein, 640 aa, synthetic construct
SRALLRETDNYSNGLIVENLVRNCHHPSKNNLNYTKTQKRDSTIPYRVEERKGHYPKIKHLIDKSYKHIKRGKRRNGHNGNIITIILLLILILKTQMSEGAIHYETLSKIGLIKGITREYKVKGTPSSKDIVIKLIPNVTGLNKCTNISMENYKEQLDKILIPINNIIELYANSTKSAPGNARFAGVIIAGVALGVAAAAQITAGIALHEARQNAERINLLKDSISATNNAVAELQEATGGIVNVITGMQDYINTNLVPQIDKLQCSQIKTALDISLSQYYSEILTVFGPNLQNPVTTSMSIQAISQSFGGNIDLLLNLLGYTANDLLDLLESKSITGQITYINLEHYFMVIRVYYPIMTTISNAYVQELIKISFNVDGSEWVSLVPSYILIRNSYLSNIDISECLITKNSVICRHDFAMPMSYTLKECLTGDTEKCPREAVVTSYVPRFAISGGVIYANCLSTTCQCYQTGKVIAQDGSQTLMMIDNQTCSIVRIEEILISTGKYLGSQEYNTMHVSVGNPVFTDKLDITSQISNINQSIEQSKFYLDKSKAILDKINLNLIGSVPISILFIIAILSLILSIITFVIVMIIVRRYNKYTPLINSDPSSRRSTIQDVYIIPNPGEHSIRSAARSIDRDRD

SEQ ID NO: 9310 - protein, 520 aa, synthetic construct
ILHYEKLSKIGLVKGITRKYKIKSNPLTKDIVIKMIPNVSNVSKCTGTVMENYKSRLTGILSPIKGAIELYNNNTHDLVGDVKLAGVVMAGIAIGIATAAQITAGVALYEAMKNADNINKLKSSIESTNEAVVKLQETAEKTVYVLTALQDYINTNLVPTIDQISCKQTELALDLALSKYLSDLLFVFGPNLQDPVSNSMTIQAISQAFGGNYETLLRTLGYATEDFDDLLESDSIAGQIVYVDLSSYYIIVRVYFPILTEIQQAYVQELLPVSFNNDNSEWISIVPNFVLIRNTLISNIEVKYCLITKKSVICNQDYATPMTASVRECLTGSTDKCPRELVVSSHVPRFALSGGVLFANCISVTCQCQTTGRAISQSGEQTLLMIDNTTCTTVVLGNIIISLGKYLGSINYNSESIAVGPPVYTDKVDISSQISSMNQSLQQSKDYIKEAQKILDTVNPSLISMLSMIILYVLSIAALCIGLITFISFVIVEKKRGNYSRLDDRQVRPVSNGDLYYIGT

SEQ ID NO: 9311 - protein, 519 aa, synthetic construct
IHYDSLSKVGVIKGLTYNYKIKGSPSTKLMVVKLIPNIDSVKNCTQKQYDEYKNLVRKALEPVKMAIDTMLNNVKSGNNKYRFAGAIMAGVALGVATAATVTAGIALHRSNENAQAIANMKSAIQNTNEAVKQLQLANKQTLAVIDTIRGEINNNIIPVINQLSCDTIGLSVGIRLTQYYSEIITAFGPALQNPVNTRITIQAISSVFNGNFDELLKIMGYTSGDLYEILHSELIRGNIIDVDVDAGYIALEIEFPNLTLVPNAVVQELMPISYNIDGDEWVTLVPRFVLTRTTLLSNIDTSRCTITDSSVICDNDYALPMSHELIGCLQGDTSKCAREKVVSSYVPKFALSDGLVYANCLNTICRCMDTDTPISQSLGATVSLLDNKRCSVYQVGDVLISVGSYLGDGEYNADNVELGPPIVIDKIDIGNQLAGINQTLQEAEDYIEKSEEFLKGVNPSIITLGSMVVLYIFMILIAIVSVIALVLSIKLTVKGNVVRQQFTYTQHVPSMENINYVSH

SEQ ID NO: 9312 - protein, 40 aa, synthetic construct
  VARIANT 1..40: note = This sequence may encompass 1-10 GGGS repeating units
GGGSGGGSGGGSGGGSGGGSGGGSGGGSGGGSGGGSGGGS

SEQ ID NO: 9313 - protein, 15 aa, synthetic construct
GGGGSGGGGSGGGGS

SEQ ID NO: 9314 - protein, 15 aa, synthetic construct
TTAASGSSGGSSSGA

SEQ ID NO: 9315 - protein, 18 aa, synthetic construct
GSTSGSGKPGSGEGSTKG

SEQ ID NO: 9316 - protein, 247 aa, synthetic construct
QVQLVQSGAEVKKPGASVKVSCKASGGTFSSYAISWVRQAPGQCLEWMGWINPNSGGTNYAQKFQGRVTMTRDTSTSTVYMELSSLRSEDTAVYYCARDGYSGSYSDWGQGTLVTVSSGGGGSGGGGSGGGGSDIVMTQSPDSLAVSLGERATINCKSSQSVLSSSYNKNYLAWYQQKPGQPPKLLIYWASTRESGVPDRFSGSGSGTDFTLTISSLQAEDVAVYYCQQYYSTPWTFGCGTKVEIKR

SEQ ID NO: 9317 - protein, 245 aa, synthetic construct
QVQLVQSGAEVKKPGSSVKVSCKASGYTFTSYDINWVRQAPGQCLEWMGGIIPLSGAPNYAHKFQGRVTITADESTSTAYMELSSLRSEDTAVYYCARGALYNWNDGWFDPWGQGTLVTVSSGGGGSGGGGSGGGGSDIQMTQSPSSLSASVGDRVTITCRASQDIGDYLAWYQQKPGKAPKLLIYDASSLQSGVPSRFSGSGSGTDFTLTISSLQPEDFATYYCQQANSFPLTFGCGTKVEIKR

SEQ ID NO: 9318 - protein, 241 aa, synthetic construct
QVQLVQSGAEVKKPGASVKVSCKASGYSLITHWMHWVRQAPGQCLEWMGMINPSDGVTYYAQTFQGRVTMTRDTSTSTVYMELSSLRSEDTAVYYCAREYYGEGFDYWGQGTLVTVSSGGGGSGGGGSGGGGSDIQMTQSPSSLSASVGDRVTITCRASQGISNYLAWYQQKPGKAPKLLIYSASNLQSGVPSRFSGSGSGTDFTLTISSLQPEDFATYYCQQSYSTPLTFGCGTKVEIKR

SEQ ID NO: 9319 - protein, 242 aa, synthetic construct
QVQLVQSGAEVKKPGSSVKVSCKASGYTFSDHHVHWVRQAPGQGLEWMGGIIPIFGTANYAQKFQGRVTITADESTSTAYMELSSLRSEDTAVYYCARGSSWYLHFQHWGQGTLVTVSSGGGGSGGGGSGGGGSDIQMTQSPSSLSASVGDRVTITCRASQGIASYLAWYQQKPGKAPKLLIYAASTLQPGVPSRFSGSGSGTDFTLTISSLQPEDFATYYCQQFDSYPITFGQGTKVEIKR

SEQ ID NO: 9320 - protein, 240 aa, synthetic construct
QVQLVQSGAEVKKPGASVKVSCKASGGTFSRYGIAWVRQAPGQGLEWMGISYPSDGSTSSAQKLQGRVTMTRDTSTSTVYMELSSLRSEDTAVYYCARDRLGDLDYWGQGTLVTVSSGGGGSGGGGSGGGGSDIQMTQSPSSLSASVGDRVTITCRASQSISSWLAWYQQKPGKAPKLLIYAASTLQSGVPSRFSGSGSGTDFTLTISSLQPEDFATYYCQQGYSTPYIFGQGTKVEIKR

SEQ ID NO: 9321 - protein, 249 aa, synthetic construct
QVQLVQSGAEVKKPGSSVKVSCKASGYTFTDYYVHWVRQAPGQGLEWVGWISTFTGNTDYAQNFQGRVTITADESTSTAYMELSSLRSEDTAVYYCARDAPLAAAGTDYYYGMDVWGQGTTVTVSSGGGGSGGGGSGGGGSDIQMTQSPSSLSASVGDRVTITCRASQGISNYLAWYQQKPGKAPKLLIYKASSLESGVPSRFSGSGSGTDFTLTISSLQPEDFATYYCQQSYNTPFTFGQGTRLEIKR

SEQ ID NO: 9322 - protein, 240 aa, synthetic construct
QVQLVQSGAEVKKPGASVKVSCKASGGTFSSYALSWVRQAPGQGLEWMGIINPSGGTNYAQKFQGRVTMTRDTSTSTVYMELSSLRSEDTAVYYCARDLGDPGMDVWGQGTLVTVSSGGGGSGGGGSGGGGSDIQMTQSPSSLSASVGDRVTITCRASQDISNYLNWYQQKPGKAPKLLIYDASNLETGVPSRFSGSGSGTDFTLTISSLQPEDFATYYCQQSYSTPLTFGQGTKVEIKR

SEQ ID NO: 9323 - protein, 247 aa, synthetic construct
QVQLVQSGAEVKKPGASVKVSCKASGGTFSSYAISWVRQAPGQGLEWMGWINPNSGGTNYAQKFQGRVTMTRDTSTSTVYMELSSLRSEDTAVYYCARDGYSGSYSDWGQGTLVTVSSGGGGSGGGGSGGGGSDIVMTQSPDSLAVSLGERATINCKSSQSVLSSSYNKNYLAWYQQKPGQPPKLLIYWASTRESGVPDRFSGSGSGTDFTLTISSLQAEDVAVYYCQQYYSTPWTFGQGTKVEIKR

SEQ ID NO: 9324 - protein, 239 aa, synthetic construct
QVQLVQSGAEVKKPGASVKVSCKASGGTFSSYALSWVRQAPGQGLEWMGIINPSGGTNYAQKFQGRVTMTRDTSTSTVYMELSSLRSEDTAVYYCARDLGDPGMDVWGQGTLVTVSSGGGGSGGGGSGGGGSDIQMTQSPSSLSASVGDRVTITCRASQDISNYLNWYQQKPGKAPKLLIYDASNLETGVPSRFSGSGSGTDFTLTISSLQPEDFATYYCQQSYSTPLTFGQGTKVEIK

SEQ ID NO: 9325 - protein, 240 aa, synthetic construct
QVQLVQSGAEVKKPGASVKVSCKASGGTFSNYAISWVRQAPGQGLEWMGIIDPSGGSTTYAQKFQGRVTMTRDTSTSTVYMELSSLRSEDTAVYYCARDLGDMGMDVWGQGTTVTVSSGGGGSGGGGSGGGGSDIQMTQSPSSLSASVGDRVTITCRASQSISSYLNWYQQKPGKAPKLLIYAASSLQSGVPSRFSGSGSGTDFTLTISSLQPEDFATYYCQQSYSTPLTFGGGTKVEIK

SEQ ID NO: 9326 - protein, 240 aa, synthetic construct
QVQLVQSGAEVKKPGASVKVSCKASGGTFSNYAFSWVRQAPGQGLEWMGIINPSGGSTSYAQKFQGRVTMTRDTSTSTVYMELSSLRSEDTAVYYCARDVGDRGMDVWGQGTTVTVSSGGGGSGGGGSGGGGSDIQMTQSPSSLSASVGDRVTITCQASQDISNYLNWYQQKPGKAPKLLIYKASSLETGVPSRFSGSGSGTDFTLTISSLQPEDFATYYCQQSFSSPLTFGQGTKVEIK

SEQ ID NO: 9327 - protein, 243 aa, synthetic construct
QVQLVQSGAEVKKPGASVKVSCKASGSTFSGYYMHWVRQAPGQGLEWMGWIDPNGGGTQYAQKFQGRVTMTRDTSTSTVYMELSSLRSEDTAVYYCAKDIVHDGTEYFQHWGQGTLVTVSSGGGGSGGGGSGGGGSDIQMTQSPSSLSASVGDRVTITCRASQNVNTWLAWYQQKPGKAPKLLIYEASSLQSGVPSRFSGSGSGTDFTLTISSLQPEDFATYYCQQANSFPFTFGQGTKLEIK

SEQ ID NO: 9328 - protein, 243 aa, synthetic construct
QVQLVQSGAEVKKPGASVKVSCKASGYTFTSYYMHWVRQAPGQGLEWMGIINPSGGSTSYAQKFQGRVTMTRDTSTSTVYMELSSLRSEDTAVYYCAKDIVHDGTEYFQHWGQGTLVTVSSGGGGSGGGGSGGGGSDIQMTQSPSSLSASVGDRVTITCRASQSISDWLAWYQQKPGKAPKLLIYAASSLQSGVPSRFSGSGSGTDFTLTISSLQPEDFATYYCAQHNHYPYTFGQGTRLEIK

SEQ ID NO: 9329 - protein, 247 aa, synthetic construct
QVQLVQSGAEVKKPGASVKVSCKASGGTFSSYAISWVRQAPGQGLEWMGIINPSGGSTNYAQKFQGRVTMTRDTSTSTVYMELSSLRSEDTAVYYCAREGRDHDAFDIWGQGTMVTVSSGGGGSGGGGSGGGGSDIVMTQSPDSLAVSLGERATINCKSSQSVLSSSYNKNYLAWYQQKPGQPPKLLIYWASTRESGVPDRFSGSGSGTDFTLTISSLQAEDVAVYYCQQYYTTPFTFGQGTKVEIK

SEQ ID NO: 9330 - protein, 247 aa, synthetic construct
QVQLVQSGAEVKKPGASVKVSCKASGFTFTDYGISWVRQAPGQGLEWMGIINPSGGSTSYAQKFQGRVTMTRDTSTSTVYMELSSLRSEDTAVYYCAREGRSHDAFDIWGQGTMVTVSSGGGGSGGGGSGGGGSDIVMTQSPDSLAVSLGERATINCKSSQSVLSSSYNKNYLAWYQQKPGQPPKLLIYWASTRASGVPDRFSGSGSGTDFTLTISSLQAEDVAVYYCQQYYSTPFTFGQGTKLEIK

SEQ ID NO: 9331 - protein, 246 aa, synthetic construct
QVQLVQSGAEVKKPGASVKVSCKASGYTFTGYYMHWVRQAPGQGLEWMGWMNPHSGDTGYAQKFQGRVTMTRDTSTSTVYMELSSLRSEDTAVYYCARWVGTTEYYYYYYMDVWGKGTTVTVSSGGGGSGGGGSGGGGSDIQMTQSPSSLSASVGDRVTITCRASQAIRDDLGWYQQKPGKAPKLLIYDASHLEAGVPSRFSGSGSGTDFTLTISSLQPEDFATYYCQQANSFPITFGQGTRLEIK

SEQ ID NO: 9332 - protein, 245 aa, synthetic construct
QVQLVQSGAEVKKPGASVKVSCKASGYTFTDYYLHWVRQAPGQGLEWMGIIDPSGGSTSIAQKFQGRVTMTRDTSTSTVYMELSSLRSEDTAVYYCATTAYYDFWSGYSMDVWGKGTTVTVSSGGGGSGGGGSGGGGSDIQMTQSPSSLSASVGDRVTITCRASQGVGNDLAWYQQKPGKAPKLLIYAASTLQTGVPSRFSGSGSGTDFTLTISSLQPEDFATYYCQQASSFPLTFGPGTKVDIK

SEQ ID NO: 9333 - protein, 246 aa, synthetic construct
QVQLVQSGAEVKKPGASVKVSCKASGYTFTSHYMHWVRQAPGQGLEWMGIIDPSGGSTSYAQEFQGRVTMTRDTSTSTVYMELSSLRSEDTAVYYCARDMDNWNTGYYYYMDVWGKGTTVTVSSGGGGSGGGGSGGGGSDIQMTQSPSSLSASVGDRVTITCRASQIIGTNLAWYQQKPGKAPKLLIYAASSLQSGVPSRFSGSGSGTDFTLTISSLQPEDFATYYCQQSYTFPVTFGQGTKLEIK

SEQ ID NO: 9334 - protein, 241 aa, synthetic construct
QVQLVQSGAEVKKPGASVKVSCKASGGTFSSYAINWVRQAPGQGLEWMGWVNPNSGDTAYAQKFQGRVTMTRDTSTSTVYMELSSLRSEDTAVYYCARDQRGGDAWDVWGKGTTVTVSSGGGGSGGGGSGGGGSDIQMTQSPSSLSASVGDRVTITCRASQSISTWLAWYQQKPGKAPKLLIYDASSLESGVPSRFSGSGSGTDFTLTISSLQPEDFATYYCQQSYSTPFTFGPGTKVDIK

SEQ ID NO: 9335 - protein, 245 aa, synthetic construct
QVQLVQSGAEVKKPGSSVKVSCKASGGTFSNYAISWVRQAPGQGLEWMGIITPSGGSTTYAHKFQGRVTITADESTSTAYMELSSLRSEDTAVYYCARDTAGHFDIWGQGTLVTVSSGGGGSGGGGSGGGGSDIVMTQSPDSLAVSLGERATINCKSSQSVLSSSNNKNYLAWYQQKPGQPPKLLIYWASTRESGVPDRFSGSGSGTDFTLTISSLQAEDVAVYYCQQYYGSPLTFGPGTKVDIK

SEQ ID NO: 9336 - protein, 247 aa, synthetic construct
QVQLVQSGAEVKKPGASVKVSCKASGGTFRNDVINWVRQAPGQGLEWIGWMNPNSGNTGYAQKFQGRVTMTRDTSTSTVYMELSSLRSEDTAVYYCARDNPDLDGMDVWGQGTLVTVSSGGGGSGGGGSGGGGSDIVMTQSPDSLAVSLGERATINCKSSQSVLSSSYNKNYLAWYQQKPGQPPKLLIYWASTRESGVPDRFSGSGSGTDFTLTISSLQAEDVAVYYCQQYYSSPPTFGQGTRLEIK

SEQ ID NO: 9337 - protein, 245 aa, synthetic construct
QVQLVQSGAEVKKPGASVKVSCKASGGTFSSYAINWVRQAPGQGLEWLGWISAYNGNTNYAQKFQGRVTMTRDTSTSTVYMELSSLRSEDTAVYYCARDLVGHFDYWGQGTLVTVSSGGGGSGGGGSGGGGSDIVMTQSPDSLAVSLGERATINCKSSQSVLSSSYNKNYLAWYQQKPGQPPKLLIYWASTRESGVPDRFSGSGSGTDFTLTISSLQAEDVAVYYCQQYYSSPPTFGGGTKVEIK

SEQ ID NO: 9338 - protein, 246 aa, synthetic construct
QVQLVQSGAEVKKPGASVKVSCKASGGTFSSYAISWVRQAPGQGLEWMGWINPNSGGTNYAQKFQGRVTMTRDTSTSTVYMELSSLRSEDTAVYYCARDGYSGSYSDWGQGTLVTVSSGGGGSGGGGSGGGGSDIVMTQSPDSLAVSLGERATINCKSSQSVLSSSYNKNYLAWYQQKPGQPPKLLIYWASTRESGVPDRFSGSGSGTDFTLTISSLQAEDVAVYYCQQYYSTPWTFGQGTKVEIK

SEQ ID NO: 9339 - protein, 247 aa, synthetic construct
QVQLVQSGAEVKKPGASVKVSCKASGNTLSSHAISWVRQAPGQGLEWMGIINPSGGSTSYAQKFQGRVTMTRDTSTSTVYMELSSLRSEDTAVYYCARDQGSSGTFDYWGQGTLVTVSSGGGGSGGGGSGGGGSDIVMTQSPDSLAVSLGERATINCKSSQSVLSSSYNKNYLAWYQQKPGQPPKLLIYWASTRASGVPDRFSGSGSGTDFTLTISSLQAEDVAVYYCQQYYGSPPTFGQGTRLEIK

SEQ ID NO: 9340 - protein, 239 aa, synthetic construct
QVQLVQSGAEVKKPGASVKVSCKASGGTLSSYAISWVRQAPGQGLEWMGWINPNSGGTNYAQKFQGRVTMTRDTSTSTVYMELSSLRSEDTAVYYCARDSTDVIDYWGQGTLVTVSSGGGGSGGGGSGGGGSDIQMTQSPSSLSASVGDRVTITCQASQDIRNYLNWYQQKPGKAPKLLIYDASTLQSGVPSRFSGSGSGTDFTLTISSLQPEDFATYYCQQAYSFPWTFGQGTKLEIK

SEQ ID NO: 9341 - protein, 249 aa, synthetic construct
QVQLVQSGAEVKKPGASVKVSCKASGYIFTSYDINWVRQAPGQGLEWMGWINPNSGDTKYAQNFQGRVTMTRDTSTSTVYMELSSLRSEDTAVYYCARDGGTVTPTEEYYYYGMDVWGQGTLVTVSSGGGGSGGGGSGGGGSDIQMTQSPSSLSASVGDRVTITCQASQDISNYLNWYQQKPGKAPKLLIYNASNLETGVPSRFSGSGSGTDFTLTISSLQPEDFATYYCQQLNSYPFTFGGGTKVEIK

SEQ ID NO: 9342 - protein, 237 aa, synthetic construct
QVQLVQSGAEVKKPGASVKVSCKASGGTFSSYAISWVRQAPGQGLEWMGWISVYNGNTNYAQNLQGRVTMTRDTSTSTVYMELSSLRSEDTAVYYCASLDDLDYWGQGTLVTVSSGGGGSGGGGSGGGGSDIQMTQSPSSLSASVGDRVTITCQASQSISTWLAWYQQKPGKAPKLLIYAASTLRSGVPSRFSGSGSGTDFTLTISSLQPEDFATYYCLQHYTYPLTFGQGTRLEIK

SEQ ID NO: 9343 - protein, 243 aa, synthetic construct
QVQLVQSGAEVKKPGASVKVSCKASGHTFTSYYIHWVRQAPGQGLEWMGWINPNNGGTHYAQKFQGRVTMTRDTSTSTVYMELSSLRSEDTAVYYCARDMVRDSAEYFQHWGQGTLVTVSSGGGGSGGGGSGGGGSDIQMTQSPSSLSASVGDRVTITCRASEDISTYLAWYQQKPGKAPKLLIYAASTLQSGVPSRFSGSGSGTDFTLTISSLQPEDFATYYCQQSHTIPWTFGQGTRLEIK

SEQ ID NO: 9344 - protein, 240 aa, synthetic construct
QVQLVQSGAEVKKPGSSVKVSCKASGYTFITSYIHWVRQAPGQGLEWMGMINPSGGTTTYAQKFQGRVTITADESTSTAYMELSSLRSEDTAVYYCARDSSGYPIDYWGQGTLVTVSSGGGGSGGGGSGGGGSDIQMTQSPSSLSASVGDRVTITCRASHHISDFLNWYQQKPGKAPKLLIYAASTLQSGVPSRFSGSGSGTDFTLTISSLQPEDFATYYCQQSYSSPYTFGQGTKLEIK

SEQ ID NO: 9345 - protein, 244 aa, synthetic construct
QVQLVQSGAEVKKPGSSVKVSCKASGYTFTSYDINWVRQAPGQGLEWMGGIIPLSGAPNYAHKFQGRVTITADESTSTAYMELSSLRSEDTAVYYCARGALYNWNDGWFDPWGQGTLVTVSSGGGGSGGGGSGGGGSDIQMTQSPSSLSASVGDRVTITCRASQDIGDYLAWYQQKPGKAPKLLIYDASSLQSGVPSRFSGSGSGTDFTLTISSLQPEDFATYYCQQANSFPLTFGGGTKVEIK

SEQ ID NO: 9346 - protein, 242 aa, synthetic construct
EVQLLESGGGLVQPGGSLRLSCAASGFTVGSWYMSWVRQAPGKGLEWVAGIWYEGSNKYYADSVKGRFTISRDNSKNTLYLQMNSLRAEDTAVYYCARLGTASLPYFDYWGQGTLVTVSSGGGGSGGGGSGGGGSDIQMTQSPSSLSASVGDRVTITCRASQDIRSYLAWYQQKPGKAPKLLIYAASSLQSGVPSRFSGSGSGTDFTLTISSLQPEDFATYYCQQSYTAPPTFGQGTRLEIK

SEQ ID NO: 9347 - protein, 239 aa, synthetic construct
QVQLVQSGAEVKKPGASVKVSCKASGYTFTGYYMHWVRQAPGQGLEWVGWINPNRGDTKYAQKFQGRVTMTRDTSTSTVYMELSSLRSEDTAVYYCARESGDGFDPWGQGTLVTVSSGGGGSGGGGSGGGGSDIQMTQSPSSLSASVGDRVTITCRASQDISNNLNWYQQKPGKAPKLLIYAASTLQSGVPSRFSGSGSGTDFTLTISSLQPEDFATYYCLQHNTYPLTFGQGTKLEIK

SEQ ID NO: 9348 - protein, 239 aa, synthetic construct
QVQLVQSGAEVKKPGSSVKVSCKASGYTFTNYYIHWVRQAPGQGLEWMGWMNPNSGNTGYAQKFQGRVTITADESTSTAYMELSSLRSEDTAVYYCARDWPNWFDPWGQGTLVTVSSGGGGSGGGGSGGGGSDIQMTQSPSSLSASVGDRVTITCRASQDISNWLAWYQQKPGKAPKLLIYDASSLQSGVPSRFSGSGSGTDFTLTISSLQPEDFATYYCQQAISFPLTFGGGTKVEIK

SEQ ID NO: 9349 - protein, 240 aa, synthetic construct
QVQLVQSGAEVKKPGASVKVSCKASGYSFTDNYIHWVRQAPGQGLEWMGWIRSDNGETSYAQKFQGRVTMTRDTSTSTVYMELSSLRSEDTAVYYCAREVQLVGFDYWGQGTLVTVSSGGGGSGGGGSGGGGSDIQMTQSPSSLSASVGDRVTITCRASQGIANYLAWYQQKPGKAPKLLIYAASSLQSGVPSRFSGSGSGTDFTLTISSLQPEDFATYYCQQADSFPLTFGQGTKVEIK

SEQ ID NO: 9350 - protein, 241 aa, synthetic construct
QVQLVQSGAEVKKPGSSVKVSCKASGYTFSDHHVHWVRQAPGQGLEWMGGIIPIFGTANYAQKFQGRVTITADESTSTAYMELSSLRSEDTAVYYCARGSSWYLHFQHWGQGTLVTVSSGGGGSGGGGSGGGGSDIQMTQSPSSLSASVGDRVTITCRASQGIASYLAWYQQKPGKAPKLLIYAASTLQPGVPSRFSGSGSGTDFTLTISSLQPEDFATYYCQQFDSYPITFGQGTKVEIK

SEQ ID NO: 9351 - protein, 244 aa, synthetic construct
QVQLVQSGAEVKKPGSSVKVSCKASGGTFSSYAIYWVRQAPGQGLEWMGGIIPIFGTTNYAQKFQGRVTITADESTSTAYMELSSLRSEDTAVYYCAKGVDRYNWNDAFDYWGQGTLVTVSSGGGGSGGGGSGGGGSDIQMTQSPSSLSASVGDRVTITCRASQGISNYLAWYQQKPGKAPKLLIYAASRLQSGVPSRFSGSGSGTDFTLTISSLQPEDFATYYCQQSSIIPFTFGQGTKLEIK

SEQ ID NO: 9352 - protein, 242 aa, synthetic construct
QVQLVQSGAEVKKPGASVKVSCKASGYTFTDYYMHWVRQAPGQGLEWMGWIHSNSGGTHSAQKFQGRVTMTRDTSTSTVYMELSSLRSEDTAVYYCARESSGYDSSLDYWGQGTLVTVSSGGGGSGGGGSGGGGSDIQMTQSPSSLSASVGDRVTITCRASQGISNYLAWYQQKPGKAPKLLIYAASTLQSGVPSRFSGSGSGTDFTLTISSLQPEDFATYYCQQAYSFPYTFGQGTKLEIK

SEQ ID NO: 9353 - protein, 242 aa, synthetic construct
QVQLVQSGAEVKKPGASVKVSCKASGGTFSSYGISWVRQAPGQGLEWVGWINPNSGDTDYAQKFQGRVTMTRDTSTSTVYMELSSLRSEDTAVYYCTTDPRLDSSDPGYWGQGTLVTVSSGGGGSGGGGSGGGGSDIQMTQSPSSLSASVGDRVTITCRASQSIGRWLAWYQQKPGKAPKLLIYDASNLETGVPSRFSGSGSGTDFTLTISSLQPEDFATYYCQQSYSTPRTFGQGTKVEIK

SEQ ID NO: 9354 - protein, 236 aa, synthetic construct
QVQLVQSGAEVKKPGASVKVSCKASGGTFGNYGINWVRQAPGQGLEWMGWISAYNGNTNYAQKFQGRVTMTRDTSTSTVYMELSSLRSEDTAVYYCARGGMDVWGQGTLVTVSSGGGGSGGGGSGGGGSDIQMTQSPSSLSASVGDRVTITCRASQSINSWLAWYQQKPGKAPKLLIYDTSSLQSGVPSRFSGSGSGTDFTLTISSLQPEDFATYYCQQTYSTPYTFGQGTKLEIK

SEQ ID NO: 9355 - protein, 239 aa, synthetic construct
QVQLVQSGAEVKKPGASVKVSCKASGGTFSRYGIAWVRQAPGQGLEWMGISYPSDGSTSSAQKLQGRVTMTRDTSTSTVYMELSSLRSEDTAVYYCARDRLGDLDYWGQGTLVTVSSGGGGSGGGGSGGGGSDIQMTQSPSSLSASVGDRVTITCRASQSISSWLAWYQQKPGKAPKLLIYAASTLQSGVPSRFSGSGSGTDFTLTISSLQPEDFATYYCQQGYSTPYIFGQGTKVEIK

SEQ ID NO: 9356 - protein, 242 aa, synthetic construct
QVQLVQSGAEVKKPGASVKVSCKASGGTFSSYAISWVRQAPGQGLEWMGWMNPNSGNTGYAQKFQGRVTMTRDTSTSTVYMELSSLRSEDTAVYYCARDSIVGGYPFDYWGQGTLVTVSSGGGGSGGGGSGGGGSDIQMTQSPSSLSASVGDRVTITCRASQSISSYLNWYQQKPGKAPKLLIYAASSLQSGVPSRFSGSGSGTDFTLTISSLQPEDFATYYCQQTDSIPITFGQGTRLEIK

SEQ ID NO: 9357 - protein, 245 aa, synthetic construct
QVQLVQSGAEVKKPGSSVKVSCKASGYTFTSYDINWVRQAPGQGLEWMGTITPIFGTTDYAQKFQGRVTITADESTSTAYMELSSLRSEDTAVYYCAREGYSSSWHDDAFDIWGQGTLVTVSSGGGGSGGGGSGGGGSDIQMTQSPSSLSASVGDRVTITCRASQSISSYLNWYQQKPGKAPKLLIYAASTLQSGVPSRFSGSGSGTDFTLTISSLQPEDFATYYCQQSYSIPYTFGQGTKVEIK

SEQ ID NO: 9358 - protein, 240 aa, synthetic construct
QVQLVQSGAEVKKPGASVKVSCKASGGTFSNYAISWVRQAPGQGLEWMGIIDPSGGSTSYAQKFQGRVTMTRDTSTSTVYMELSSLRSEDTAVYYCARDLGDYGLDSWGQGTLVTVSSGGGGSGGGGSGGGGSDIQMTQSPSSLSASVGDRVTITCRASQTIRSYLNWYQQKPGKAPKLLIYKASSLESGVPSRFSGSGSGTDFTLTISSLQPEDFATYYCQQTYTIPITFGPGTKVDIK

SEQ ID NO: 9359 - protein, 247 aa, synthetic construct
QVQLVQSGAEVKKPGASVKVSCKASGYTFTGYYMHWVRQAPGQGLEWMGWMNPNSGDTGYAQRFQGRVTMTRDTSTSTVYMELSSLRSEDTAVYYCATGGSDSSGYYYEGYFQHWGQGTLVTVSSGGGGSGGGGSGGGGSDIQMTQSPSSLSASVGDRVTITCRASQTISNWLAWYQQKPGKAPKLLIYAASTLQSGVPSRFSGSGSGTDFTLTISSLQPEDFATYYCQQANSFPPTFGQGTKVEIK

SEQ ID NO: 9360 - protein, 245 aa, synthetic construct
QVQLVQSGAEVKKPGASVKVSCKASGGTFSSYAISWVRQAPGQGLEWLGYMSPNSGNTGYAQKFQGRVTMTRDTSTSTVYMELSSLRSEDTAVYYCARDKGGYYDSSGYYWYWGQGTLVTVSSGGGGSGGGGSGGGGSDIQMTQSPSSLSASVGDRVTITCRASQYIGSYLNWYQQKPGKAPKLLIYDASNLETGVPSRFSGSGSGTDFTLTISSLQPEDFATYYCQQVDSYPLTFGGGTKVEIK

SEQ ID NO: 9361 - protein, 249 aa, synthetic construct
EVQLLESGGGLVQPGGSLRLSCAASGFSLSSYEMHWVRQAPGKGLEWVSAISSNGGSTYYADSVKGRFTISRDNSKNTLYLQMNSLRAEDTAVYYCARVGDGDGYNPDFDYWGQGTLVTVSSGGGGSGGGGSGGGGSDIVMTQSPLSLPVTPGEPASISCRSSQSLLHSNGYNYLDWYLQKPGQSPQLLIYLGSNRASGVPDRFSGSGSGTDFTLKISRVEAEDVGVYYCMQGTHWPPTFGQGTKLEIK

SEQ ID NO: 9362 - protein, 246 aa, synthetic construct
QVQLVQSGAEVKKPGSSVKVSCKASGYTFTSYGISWVRQAPGQGLEWMGWIDPTSGATDTAHKFQGRVTITADESTSTAYMELSSLRSEDTAVYYCAKDPIVATEVDYWGQGTLVTVSSGGGGSGGGGSGGGGSDIVMTQSPLSLPVTPGEPASISCRSSQSLLHSNGYNYLDWYLQKPGQSPQLLIYFGSNRASGVPDRFSGSGSGTDFTLKISRVEAEDVGVYYCMQALQAPVSFGQGTRLEIK

SEQ ID NO: 9363 - protein, 244 aa, synthetic construct
QVQLVQSGAEVKKPGASVKVSCKASGGTFSSYAISWVRQAPGQGLEWMGWMSPNSGNTGYAQKFQGRVTMTRDTSTSTVYMELSSLRSEDTAVYYCARDSGAFDIWGQGTMVTVSSGGGGSGGGGSGGGGSDIVMTQSPDSLAVSLGERATINCKSSQSVLSSSYNKNYLAWYQQKPGQPPKLLIYWASSRQSGVPDRFSGSGSGTDFTLTISSLQAEDVAVYYCQQYYSTPLTFGQGTKVEIK

SEQ ID NO: 9364 - protein, 246 aa, synthetic construct
QVQLVQSGAEVKKPGASVKVSCKASGVTISNYAISWVRQAPGQGLEWMGWMNPNSGNTGYAQKFQGRVTMTRDTSTSTVYMELSSLRSEDTAVYYCAREGLLDAFDIWGQGTMVTVSSGGGGSGGGGSGGGGSDIVMTQSPDSLAVSLGERATINCKSSQSVSSSSYNKNYLAWYQQKPGQPPKLLIYWASVRESGVPDRFSGSGSGTDFTLTISSLQAEDVAVYYCQQYYSTPITFGQGTRLEIK

SEQ ID NO: 9365 - protein, 247 aa, synthetic construct
QVQLVQSGAEVKKPGASVKVSCKASGGTFSRYGITWVRQAPGQGLEWMGWMNPYDGNTGYAQKFQGRVTMTRDTSTSTVYMELSSLRSEDTAVYYCARGGRHHDAFDIWGQGTMVTVSSGGGGSGGGGSGGGGSDIVMTQSPDSLAVSLGERATINCKSTQNVLSSSNNNSYLAWYQQKPGQPPKLLIYWASTRESGVPDRFSGSGSGTDFTLTISSLQAEDVAVYYCQQYYSTPFTFGQGTRLEIK

SEQ ID NO: 9366 - protein, 240 aa, synthetic construct
QVQLVQSGAEVKKPGASVKVSCKASGGTFSSYAISWVRQAPGQGLEWMGIINPSGDGTNYAQKFQGRVTMTRDTSTSTVYMELSSLRSEDTAVYYCARDISNDAFDIWGQGTMVTVSSGGGGSGGGGSGGGGSDIQMTQSPSSLSASVGDRVTITCQASQDIGNYLNWYQQKPGKAPKLLIYAASSLQSGVPSRFSGSGSGTDFTLTISSLQPEDFATYYCQQTYNTPLTFGGGTKLEIK

SEQ ID NO: 9367 - protein, 241 aa, synthetic construct
QVQLVQSGAEVKKPGASVKVSCKASGYILTGHYMHWVRQAPGQGLEWMGWISAYNGDTNYAQKFQGRVTMTRDTSTSTVYMELSSLRSEDTAVYYCARGSSWDDAFDIWGQGTMVTVSSGGGGSGGGGSGGGGSDIQMTQSPSSLSASVGDRVTITCQASQDISNYLNWYQQKPGKAPKLLIYEASTLQSGVPSRFSGSGSGTDFTLTISSLQPEDFATYYCQQSYSTPFTFGPGTKVDIK

SEQ ID NO: 9368 - protein, 240 aa, synthetic construct
EVQLVESGGGLVKPGGSLRLSCAASGFTFSNHYTSWVRQAPGKGLEWVSAIGAGGGTYYADSVKGRFTISRDDSKNTLYLQMNSLKTEDTAVYYCAREGWNDDVFDIWGQGTMVTVSSGGGGSGGGGSGGGGSDIQMTQSPSSLSASVGDRVTITCQASQDISTWLAWYQQKPGKAPKLLIYRASTLESGVPSRFSGSGSGTDFTLTISSLQPEDFATYYCQQSYSIPLTFGGGTKVEIK

SEQ ID NO: 9369 - protein, 240 aa, synthetic construct
QVQLVQSGAEVKKPGASVKVSCKASGGTFSSYAISWVRQAPGQGLEWVGIINPSAGTTYYAERFQGRVTMTRDTSTSTVYMELSSLRSEDTAVYYCARDGNFGAFDIWGQGTMVTVSSGGGGSGGGGSGGGGSDIQMTQSPSSLSASVGDRVTITCRASQNINNYLNWYQQKPGKAPKLLIYAASRLQSGVPSRFSGSGSGTDFTLTISSLQPEDFATYYCQQSYSAPVTFGQGTKLEIK

SEQ ID NO: 9370 - protein, 249 aa, synthetic construct
QVQLVQSGAEVKKPGSSVKVSCKASGYSFTTYAITWVRQAPGQGLEWMGEIIPIFGTANYAQKFQGRVTITADESTSTAYMELSSLRSEDTAVYYCARDKSGWNYGSGSYNDAFDIWGQGTMVTVSSGGGGSGGGGSGGGGSDIQMTQSPSSLSASVGDRVTITCRASQNINTWLAWYQQKPGKAPKLLIYAASSLQSGVPSRFSGSGSGTDFTLTISSLQPEDFATYYCQQAYSFPFTFGPGTKVDIK

SEQ ID NO: 9371 - protein, 239 aa, synthetic construct
QVQLVQSGAEVKKPGASVKVSCKASGYAFTGYYMHWVRQAPGQGLEWMGWMNPNSGKTEYAQKFQGRVTMTRDTSTSTVYMELSSLRSEDTAVYYCARDGGLDFDYWGQGTMVTVSSGGGGSGGGGSGGGGSDIQMTQSPSSLSASVGDRVTITCRASQRIGNYLNWYQQKPGKAPKLLIYAASSLQSGVPSRFSGSGSGTDFTLTISSLQPEDFATYYCQQSYSTPLTFGGGTKVEIK

SEQ ID NO: 9372 - protein, 241 aa, synthetic construct
QVQLVQSGAEVKKPGASVKVSCKASGYTFTTYYIHWVRQAPGQGLEWMGWMNPNTGDTGSAQKFQGRVTMTRDTSTSTVYMELSSLRSEDTAVYYCAKDPAVTPDAFDIWGQGTMVTVSSGGGGSGGGGSGGGGSDIQMTQSPSSLSASVGDRVTITCRASQSISTYLNWYQQKPGKAPKLLIYAASTLQSGVPSRFSGSGSGTDFTLTISSLQPEDFATYYCQQSYRTVTFGQGTRLEIK

SEQ ID NO: 9373 - protein, 240 aa, synthetic construct
QVQLVQSGAEVKKPGASVKVSCKASGGTLSSYAISWVRQAPGQGLEWMGIIDPSGGGTSYAQKLQGRVTMTRDTSTSTVYMELSSLRSEDTAVYYCAGSLYYYGMDVWGQGTMVTVSSGGGGSGGGGSGGGGSEIVMTQSPATLSVSPGERATLSCRASQSVGSYLAWYQQKPGQAPRLLIYGASTRATGIPARFSGSGSGTEFTLTISSLQSEDFAVYYCQQYDSSSQTFGQGTKVEIK

SEQ ID NO: 9374 - protein, 243 aa, synthetic construct
QVQLVQSGAEVKKPGSSVKVSCKASGGTFGSSAISWVRQAPGQGLEWMGGIIPIFGTANYAQKFQGRVTITADESTSTAYMELSSLRSEDTAVYYCAKEDDILPPRAFDIWGQGTMVTVSSGGGGSGGGGSGGGGSEIVMTQSPATLSVSPGERATLSCRASRSVSTYLAWYQQKPGQAPRLLIYGASTRATGIPARFSGSGSGTEFTLTISSLQSEDFAVYYCQQYDGSPYTFGQGTKLEIK

SEQ ID NO: 9375 - protein, 248 aa, synthetic construct
EVQLLESGGGLVQPGGSLRLSCAASGFTFDDYAMHWVRQAPGKGLEWVSGISGGGGVTYYADSVKGRFTISRDNSKNTLYLQMNSLRAEDTAVYYCARVYSSGWLDAFDIWGQGTMVTVSSGGGGSGGGGSGGGGSDIVMTQSPLSLPVTPGEPASISCRSSQSLLHSNGYNYLDWYLQKPGQSPQLLIYDASNLETGVPDRFSGSGSGTDFTLKISRVEAEDVGVYYCMQALQTPPAFGPGTKVDIK

SEQ ID NO: 9376 - protein, 247 aa, synthetic construct
QVQLVQSGAEVKKPGASVKVSCKASGGTFSSYAISWVRQAPGQGLEWMGWISGYNGNTNYAQKFQGRVTMTRDTSTSTVYMELSSLRSEDTAVYYCASSDVSPDAFDIWGQGTTVTVSSGGGGSGGGGSGGGGSDIVMTQSPDSLAVSLGERATINCKSSQSVLSSSYNKNFLAWYQQKPGQPPKLLIYWASTRESGVPDRFSGSGSGTDFTLTISSLQAEDVAVYYCQQYYSAPPTFGQGTKVEIK

SEQ ID NO: 9377 - protein, 248 aa, synthetic construct
QVQLVQSGAEVKKPGASVKVSCKASGGTQNIYAITWVRQAPGQGLEWVGWVNPNSGNTGYSQKFQGRVTMTRDTSTSTVYMELSSLRSEDTAVYYCATPTSSSDDAFDIWGQGTTVTVSSGGGGSGGGGSGGGGSDIVMTQSPDSLAVSLGERATINCKSSQSVLSSSYNKNFLAWYQQKPGQPPKLLIYWASTRESGVPDRFSGSGSGTDFTLTISSLQAEDVAVYYCQQYYSDPITFGQGTKLEIK

SEQ ID NO: 9378 - protein, 247 aa, synthetic construct
QVQLVQSGAEVKKPGSSVKVSCKASGGTFSSYAISWVRQAPGQGLEWMGWINPNSGGTNYAQKFQGRVTITADESTSTAYMELSSLRSEDTAVYYCARASRGDDAFDIWGQGTTVTVSSGGGGSGGGGSGGGGSDIVMTQSPDSLAVSLGERATINCKSSQSVLSSSYNKNYLAWYQQKPGQPPKLLIYWASARESGVPDRFSGSGSGTDFTLTISSLQAEDVAVYYCQQYYSIPIAFGQGTRLEIK

SEQ ID NO: 9379 - protein, 257 aa, synthetic construct
QVQLVQSGAEVKKPGASVKVSCKASGIPFTSDDINWVRQAPGQGLEWMGIINPSGGSTSYAQKFQGRVTMTRDTSTSTVYMELSSLRSEDTAVYYCARERYEGGYSSGPGNYYYGMDVWGQGTTVTVSSGGGGSGGGGSGGGGSDIVMTQSPDSLAVSLGERATINCKSSQSVLSSSYNKNYLAWYQQKPGQPPKLLIYWASTRDSGVPDRFSGSGSGTDFTLTISSLQAEDVAVYYCQQYYSIPYTFGQGTKLEIK

SEQ ID NO: 9380 - protein, 246 aa, synthetic construct
QVQLVQSGAEVKKPGASVKVSCKASGGTFSNYAISWVRQAPGQGLEWMGWMNPNSGNTGYAQKFQGRVTMTRDTSTSTVYMELSSLRSEDTAVYYCARDDDYGDYPVWGQGTTVTVSSGGGGSGGGGSGGGGSDIVMTQSPDSLAVSLGERATINCKSSQSVLSTSYNKNYLAWYQQKPGQPPKLLIYWASTRASGVPDRFSGSGSGTDFTLTISSLQAEDVAVYYCQQYYTTPPTFGQGTKVEIK

SEQ ID NO: 9381 - protein, 247 aa, synthetic construct
QVQLVQSGAEVKKPGASVKVSCKASGDTFSDHAINWVRQAPGQGLEWMGWMNPKIGNTGYAQKFQGRVTMTRDTSTSTVYMELSSLRSEDTAVYYCVYDSSGYDAFDIWGQGTTVTVSSGGGGSGGGGSGGGGSDIVMTQSPDSLAVSLGERATINCKSSQSVLSTSYNRNFLAWYQQKPGQPPKLLIYWASTRQSGVPDRFSGSGSGTDFTLTISSLQAEDVAVYYCQQYYSTPYTFGQGTKLEIK

SEQ ID NO: 9382 - protein, 257 aa, synthetic construct
QVQLVQSGAEVKKPGASVKVSCKASGYTFTSYDINWVRQAPGQGLEWMGRINPGTGGTDYAHKFQGRVTMTRDTSTSTVYMELSSLRSEDTAVYYCARETPSDYYDSSGYYYNDAFDIWGQGTTVTVSSGGGGSGGGGSGGGGSDIVMTQSPDSLAVSLGERATINCKSSQSVLYSSNNKNYLAWYQQKPGQPPKLLIYWASTRESGVPDRFSGSGSGTDFTLTISSLQAEDVAVYYCQQYYSTPLTFGGGTKVEIK

SEQ ID NO: 9383 - protein, 237 aa, synthetic construct
QVQLVQSGAEVKKPGSSVKVSCKASGGTFSSYAISWVRQAPGQGLEWVGIIIPSGGTNYAQTFQGRVTITADESTSTAYMELSSLRSEDTAVYYCARDLGTTFDIWGQGTTVTVSSGGGGSGGGGSGGGGSDIQMTQSPSSLSASVGDRVTITCQASQDISNYLNWYQQKPGKAPKLLIYAASSLQSGVPSRFSGSGSGTDFTLTISSLQPEDFATYYCQQSYSTPTFGQGTKVEIK

SEQ ID NO: 9384 - protein, 244 aa, synthetic construct
QVQLVQSGAEVKKPGASVKVSCKASGYTFTAYYLHWVRQAPGQGLEWIGWINPDNDNAYYAQKFQGRVTMTRDTSTSTVYMELSSLRSEDTAVYYCAKDIAVAALAYGMDVWGQGTTVTVSSGGGGSGGGGSGGGGSDIQMTQSPSSLSASVGDRVTITCQASQDISNYLNWYQQKPGKAPKLLIYGASTLQSGVPSRFSGSGSGTDFTLTISSLQPEDFATYYCQEADSFPLTFGGGTKVEIK

SEQ ID NO: 9385 - protein, 242 aa, synthetic construct
EVQLLESGGGLVQPGGSLRLSCAASGFTFSSYAMSWVRQAPGKGLEWVAVISYDGSDQYYADSVKGRFTISRDNSKNTLYLQMNSLRAEDTAVYYCARQSLYYYYGMDVWGQGTTVTVSSGGGGSGGGGSGGGGSDIQMTQSPSSLSASVGDRVTITCRASQGIRNDLGWYQQKPGKAPKLLIYDASSLHSGVPSRFSGSGSGTDFTLTISSLQPEDFATYYCQQAYSFPWTFGQGTKLEIK

SEQ ID NO: 9386 - protein, 248 aa, synthetic construct
QVQLVQSGAEVKKPGSSVKVSCKASGYTFTDYYVHWVRQAPGQGLEWVGWISTFTGNTDYAQNFQGRVTITADESTSTAYMELSSLRSEDTAVYYCARDAPLAAAGTDYYYGMDVWGQGTTVTVSSGGGGSGGGGSGGGGSDIQMTQSPSSLSASVGDRVTITCRASQGISNYLAWYQQKPGKAPKLLIYKASSLESGVPSRFSGSGSGTDFTLTISSLQPEDFATYYCQQSYNTPFTFGQGTRLEIK

SEQ ID NO: 9387 - protein, 242 aa, synthetic construct
EVQLLESGGGLVQPGGSLRLSCAASGFTFSSYAMSWVRQAPGKGLEWVAFISDDGITKYYADSVKGRFTISRDNSKNTLYLQMNSLRAEDTAVYYCARDDSSGYGGMDVWGQGTTVTVSSGGGGSGGGGSGGGGSDIQMTQSPSSLSASVGDRVTITCRASQSINRWLAWYQQKPGKAPKLLIYSASNLQSGVPSRFSGSGSGTDFTLTISSLQPEDFATYYCQQSYNTPLTFGGGTKVEIK

SEQ ID NO: 9388 - protein, 243 aa, synthetic construct
EVQLLESGGGLVQPGGSLRLSCAASGFTFSSYAMHWVRQAPGKGLEWVAVISYDGGDKYYADSVKGRFTISRDNSKNTLYLQMNSLRAEDTAVYYCASGSLVLGYYYMDVWGQGTTVTVSSGGGGSGGGGSGGGGSDIQMTQSPSSLSASVGDRVTITCRASQSINTWLAWYQQKPGKAPKLLIYAASSLQSGVPSRFSGSGSGTDFTLTISSLQPEDFATYYCQQANSFPFTFGPGTKVDIK

SEQ ID NO: 9389 - protein, 243 aa, synthetic construct
QVQLVQSGAEVKKPGASVKVSCKASGYTFTNYYIHWVRQAPGQGLEWMGWINPNTGGTDYAQKFQGRVTMTRDTSTSTVYMELSSLRSEDTAVYYCATGGGGSYYDAFDVWGQGTTVTVSSGGGGSGGGGSGGGGSDIQMTQSPSSLSASVGDRVTITCRASQSIRTWLAWYQQKPGKAPKLLIYDASSLETGVPSRFSGSGSGTDFTLTISSLQPEDFATYYCQQLNSYPLTFGGGTKVEIK

SEQ ID NO: 9390 - protein, 241 aa, synthetic construct
QVQLVQSGAEVKKPGASVKVSCKASGGTFSSYAISWVRQAPGQGLEWMGRINPNSGNTGYAQKFQGRVTMTRDTSTSTVYMELSSLRSEDTAVYYCARDIGEGYSMDVWGQGTTVTVSSGGGGSGGGGSGGGGSDIQMTQSPSSLSASVGDRVTITCRASQSIRTYLNWYQQKPGKAPKLLIYAASTLQSGVPSRFSGSGSGTDFTLTISSLQPEDFATYYCQQSYSAPLTFGGGTKLEIK

SEQ ID NO: 9391 - protein, 248 aa, synthetic construct
EVQLLESGGGLVQPGGSLRLSCAASGFTFSNHYTSWVRQAPGKGLEWVAVISYDGSNKYYADSVKGRFTISRDNSKNTLYLQMNSLRAEDTAVYYCAREEKYSSSWYVGVDAFDIWGQGTTVTVSSGGGGSGGGGSGGGGSDIQMTQSPSSLSASVGDRVTITCRASQSISTYLNWYQQKPGKAPKLLIYAASSLHSGVPSRFSGSGSGTDFTLTISSLQPEDFATYYCQQSYSTPLTFGGGTKVEIK

SEQ ID NO: 9392 - protein, 247 aa, synthetic construct
EVQLLESGGGLVQPGGSLRLSCAASGFTFSSSAMHWVRQAPGKGLEWISSISGSGDNAYYADSVKGRFTISRDNSKNTLYLQMNSLRAEDTAVYYCARDQEDYYYDSSGYGMDVWGQGTTVTVSSGGGGSGGGGSGGGGSDIQMTQSPSSLSASVGDRVTITCRASQSITTYLNWYQQKPGKAPKLLIYAASTLQSGVPSRFSGSGSGTDFTLTISSLQPEDFATYYCQQSYSTPLTFGGGTKVEIK

SEQ ID NO: 9393 - protein, 253 aa, synthetic construct
QVQLVQSGAEVKKPGSSVKVSCKASGGTFSSHAISWVRQAPGQGLEWMGGIIPIFGTANYAQKFQGRVTITADESTSTAYMELSSLRSEDTAVYYCAKGDWGIVVVPAAIGAFDIWGQGTTVTVSSGGGGSGGGGSGGGGSDIVMTQSPLSLPVTPGEPASISCRSSQSLLHSNGYNYLDWYLQKPGQSPQLLIYAASSLQSGVPDRFSGSGSGTDFTLKISRVEAEDVGVYYCMQARQTPLTFGQGTRLEIK

SEQ ID NO: 9394 - protein, 253 aa, synthetic construct
QVQLVQSGAEVKKPGSSVKVSCKASGYTFTAYYMHWVRQAPGQGLEWVGRISPVFGSTTYAQRFQGRVTITADESTSTAYMELSSLRSEDTAVYYCARDLGYYDSSGYRYDAFDIWGQGTTVTVSSGGGGSGGGGSGGGGSDIVMTQSPLSLPVTPGEPASISCRSSQSLLHSNGYNYLDWYLQKPGQSPQLLIYGASSLQSGVPDRFSGSGSGTDFTLKISRVEAEDVGVYYCMQTLQTPFTFGPGTKVDIK

SEQ ID NO: 9395 - protein, 245 aa, synthetic construct
QVQLVQSGAEVKKPGSSVKVSCKASGYTFTSYDINWVRQAPGQGLEWMGGISPMFGTANYAQKFQGRVTITADESTSTAYMELSSLRSEDTAVYYCAKDGWYYGMDVWGQGTTVTVSSGGGGSGGGGSGGGGSDIVMTQSPLSLPVTPGEPASISCRSSQSLLHSNGYNYLDWYLQKPGQSPQLLIYLGSDRASGVPDRFSGSGSGTDFTLKISRVEAEDVGVYYCMQALQTPLTFGPGTKVDIK

SEQ ID NO: 9396 - protein, 249 aa, synthetic construct
QVQLVQSGAEVKKPGSSVKVSCKASGGTFSSYGISWVRQAPGQGLEWMGWINPNSGGTKYAQKFQGRVTITADESTSTAYMELSSLRSEDTAVYYCARGEAGNLDWYFDLWGRGTLVTVSSGGGGSGGGGSGGGGSDIVMTQSPDSLAVSLGERATINCKSSQTVFSTSYNKNYLAWYQQKPGQPPKLLIYWASTRESGVPDRFSGSGSGTDFTLTISSLQAEDVAVYYCQQYYSTPLTFGGGTKVEIK

SEQ ID NO: 9397 - protein, 245 aa, synthetic construct
QVQLVQSGAEVKKPGASVKVSCKASGGTFSNYGISWVRQAPGQGLEWMGWINPNNGDTKYAQKFQGRVTMTRDTSTSTVYMELSSLRSEDTAVYYCAREDVWYFDLWGRGTLVTVSSGGGGSGGGGSGGGGSDIVMTQSPDSLAVSLGERATINCKTSQSVFSTSYNRDYLAWYQQKPGQPPKLLIYWASTRESGVPDRFSGSGSGTDFTLTISSLQAEDVAVYYCQQYYSSPPTFGQGTKVEIK

SEQ ID NO: 9398 - protein, 241 aa, synthetic construct
QVQLVQSGAEVKKPGASVKVSCKASGYTFTTYGISWVRQAPGQGLEWMGWISTYDGKTNYAQKLQGRVTMTRDTSTSTVYMELSSLRSEDTAVYYCALHLGGDWYFDLWGRGTLVTVSSGGGGSGGGGSGGGGSDIQMTQSPSSLSASVGDRVTITCRASQSISSWLAWYQQKPGKAPKLLIYDASTLQSGVPSRFSGSGSGTDFTLTISSLQPEDFATYYCQQSYSTPFTFGPGTKVDIK

SEQ ID NO: 9399 - protein, 241 aa, synthetic construct
QVQLVQSGAEVKKPGASVKVSCKASGYTFTGYYMHWVRQAPGQGLEWMGWINPNTGATYYAQKFQGRVTMTRDTSTSTVYMELSSLRSEDTAVYYCARQHGDYDWYFDLWGRGTLVTVSSGGGGSGGGGSGGGGSDIQMTQSPSSLSASVGDRVTITCRASQSISSYLNWYQQKPGKAPKLLIYDASNLKTGVPSRFSGSGSGTDFTLTISSLQPEDFATYYCQQSYSFPTFGGGTKVEIK

SEQ ID NO: 9400 - protein, 237 aa, synthetic construct
QVQLVQSGAEVKKPGASVKVSCKASGDTFTTYYVHWVRQAPGQGLEWMGWINPNSGNTGYAQKFQGRVTMTRDTSTSTVYMELSSLRSEDTAVYYCARDSGRHWGQGTLVTVSSGGGGSGGGGSGGGGSEIVMTQSPATLSVSPGERATLSCRASQSVSSYLAWYQQKPGQAPRLLIYDTSSRATGIPARFSGSGSGTEFTLTISSLQSEDFAVYYCQQYYDTPYTFGQGTKLEIKR

SEQ ID NO: 9401 - protein, 249 aa, synthetic construct
QVQLVQSGAEVKKPGSSVKVSCKASGGTFSSYGISWVRQAPGQGLEWMGRIIPMLGIANYAQKFQGRVTITADESTSTAYMELSSLRSEDTAVYYCVREEVAGANWFDPWGQGTLVTVSSGGGGSGGGGSGGGGSDIVMTQSPDSLAVSLGERATINCKSSQSVLYSSNNKNYLAWYQQKPGQPPKLLIYLASTREPGVPDRFSGSGSGTDFTLTISSLQAEDVAVYYCQQYYSTPPTFGGGTKLEIKR

SEQ ID NO: 9402 - protein, 249 aa, synthetic construct
QVQLVQSGAEVKKPGASVKVSCKASGYTFTSYAMNWVRQAPGQGLEWMGIINPSGGSTSYARKFQGRVTMTRDTSTSTVYMELSSLRSEDTAVYYCAREGDYGSGEFDYWGQGTLVTVSSGGGGSGGGGSGGGGSDIVMTQSPDSLAVSLGERATINCKSSQSVLSSSYNKNYVAWYQQKPGQPPKLLIYWASTRESGVPDRFSGSGSGTDFTLTISSLQAEDVAVYYCQQYYSTPLTFGGGTKVEIKR

SEQ ID NO: 9403 - protein, 245 aa, synthetic construct
QVQLVQSGAEVKKPGASVKVSCKASGYTFTSSYMHWVRQAPGQGLEWMGWMNPRSGNTGYAQKFQGRVTMTRDTSTSTVYMELSSLRSEDTAVYYCARERDDYGDYGWLDYWGQGTLVTVSSGGGGSGGGGSGGGGSDIQMTQSPSSLSASVGDRVTITCQASQDISNYLNWYQQKPGKAPKLLIYAAASLQSGVPSRFSGSGSGTDFTLTISSLQPEDFATYYCQQTYSTPWTFGQGTRLEIKR

SEQ ID NO: 9404 - protein, 249 aa, synthetic construct
QVQLVQSGAEVKKPGASVKVSCKASGYTFTGYYMHWVRQAPGQGLEWMGIINPSGGSTSYAQKFQGRVTMTRDTSTSTVYMELSSLRSEDTAVYYCARDLYDSSGYWHYYYYMDVWGKGTTVTVSSGGGGSGGGGSGGGGSDIQMTQSPSSLSASVGDRVTITCRASQDINTYLAWYQQKPGKAPKLLIYAASSLQSGVPSRFSGSGSGTDFTLTISSLQPEDFATYYCQQSSSFPLTFGQGTKVEIKR

SEQ ID NO: 9405 - protein, 241 aa, synthetic construct
QVQLVQSGAEVKKPGSSVKVSCKASGGTFSSYAFSWVRQAPGQGLEWMGWINPNSGGTNYAQKFQGRVTITADESTSTAYMELSSLRSEDTAVYYCARFSGYDYVDYWGQGTLVTVSSGGGGSGGGGSGGGGSDIQMTQSPSSLSASVGDRVTITCQASQDISNYLNWYQQKPGKAPKLLIYAASSLQSGVPSRFSGSGSGTDFTLTISSLQPEDFATYYCQQLYNFPYTFGGGTKVEIKR

SEQ ID NO: 9406 - protein, 240 aa, synthetic construct
QVQLVQSGAEVKKPGASVKVSCKASGGTFSSYAISWVRQAPGQGLEWMGIINPNGGNTSYAQKFQGRVTMTRDTSTSTVYMELSSLRSEDTAVYYCARDVGEDFDLWGQGTMVTVSSGGGGSGGGGSGGGGSDIQMTQSPSSLSASVGDRVTITCRASQSISRYLAWYQQKPGKAPKLLIYGASTRESGVPSRFSGSGSGTDFTLTISSLQPEDFATYYCQQSYNTPLTFGQGTKLEIKR

SEQ ID NO: 9407 - protein, 242 aa, synthetic construct
QVQLVQSGAEVKKPGSSVKVSCKASGYTFTSYYIHWVRQAPGQGLEWLGVINPADGDTTYAQMFQGRVTITADESTSTAYMELSSLRSEDTAVYYCARDFDWLFAMDVWGKGTTVTVSSGGGGSGGGGSGGGGSDIQMTQSPSSLSASVGDRVTITCRASQTLSGWLAWYQQKPGKAPKLLIYGASTLQGGVPSRFSGSGSGTDFTLTISSLQPEDFATYYCQQYYSYPPTFGQGTKVEIKR

SEQ ID NO: 9408 - protein, 240 aa, synthetic construct
QVQLVQSGAEVKKPGASVKVSCKASGGTFSNYALNWVRQAPGQGLEWMGRINPNGGTTYYAKNFQGRVTMTRDTSTSTVYMELSSLRSEDTAVYYCAKHGDHGFYVWGLWTKGTVSSGGGGSGGGGSGGGGSDIQMTQSPSSLSASVGDRVTITCFASQDIINYLNWYQQKPGKAPKLLIYEASNLETGVPSRFSGSGSGTDFTLTISSLQPEDFATYYCQQSYSTPLTFGQGTKVEIKR

SEQ ID NO: 9409 - protein, 242 aa, synthetic construct
QVQLVQSGAEVKKPGASVKVSCKASGGTFSSYAISWVRQAPGQGLEWMGMINPNVGSATYAQRFQGRVTMTRDTSTSTVYMELSSLRSEDTAVYYCAREDSGTSWFDPWGQGTLVTVSSGGGGSGGGGSGGGGSDIQMTQSPSSLSASVGDRVTITCRASQSISSYLNWYQQKPGKAPKLLIYDVFNLGTGVPSRFSGSGSGTDFTLTISSLQPEDFATYYCQQSYSSPFTFGQGTRLEIKR

SEQ ID NO: 9410 - protein, 245 aa, synthetic construct
QVQLVQSGAEVKKPGASVKVSCKASGYTFTSYYMHWVRQAPGQGLEWMGIINPSDGSTSYAQRFQGRVTMTRDTSTSTVYMELSSLRSEDTAVYYCARDDRGSNYYYGMDVWGQGTTVTVSSGGGGSGGGGSGGGGSDIQMTQSPSSLSASVGDRVTITCQASQDISNYLNWYQQKPGKAPKLLIYMASNLESGVPSRFSGSGSGTDFTLTISSLQPEDFATYYCQQTNSFPLTFGQGTKLEIKR

SEQ ID NO: 9411 - protein, 248 aa, synthetic construct
QVQLVQSGAEVKKPGASVKVSCKASGYTFTAYYVHWVRQAPGQGLEWMGWMNPNSGTTGYAQKFQGRVTMTRDTSTSTVYMELSSLRSEDTAVYYCARDSSDYYGDYRADAFDIWGQGTMVTVSSGGGGSGGGGSGGGGSDIQMTQSPSSLSASVGDRVTITCRASQSISSYLNWYQQKPGKAPKLLIYDASNLETGVPSRFSGSGSGTDFTLTISSLQPEDFATYYCQQSYSTPLTFGGGTKVEIKR

SEQ ID NO: 9412 - protein, 241 aa, synthetic construct
QVQLVQSGAEVKKPGSSVKVSCKASGYTFTSYDINWVRQAPGQGLEWMGVISPSGDATLYAQSFQGRVTITADESTSTAYMELSSLRSEDTAVYYCVKGLDHWGQGTLVTVSSGGGGSGGGGSGGGGSDIVMTQSPLSLPVTPGEPASISCRSSQSLLHSNGYNYLDWYLQKPGQSPQLLIYLGSNRASGVPDRFSGSGSGTDFTLKISRVEAEDVGVYYCMQALQSPWTFGQGTKLEIKR

SEQ ID NO: 9413 - protein, 254 aa, synthetic construct
EVQLLESGGGLVQPGGSLRLSCAASGFSFSDYGMHWVRQAPGKGLEWVSAIGGIGDSTYYADSVKGRFTISRDNSKNTLYLQMNSLRAEDTAVYYCARMNYGDSNYYYYYGMDVWGQGTTVTVSSGGGGSGGGGSGGGGSDIVMTQSPDSLAVSLGERATINCKSSQSVLYSSNNKNYLAWYQQKPGQPPKLLIYWASTRESGVPDRFSGSGSGTDFTLTISSLQAEDVAVYYCQQYYSSPLTFGGGTKVEIKR

SEQ ID NO: 9414 - protein, 244 aa, synthetic construct
QVQLVQSGAEVKKPGASVKVSCKASGYTFTSYDISWVRQAPGQGLEWMGMISPSDGSTTYAPKFQGRVTMTRDTSTSTVYMELSSLRSEDTAVYYCARGAVGFDYWGQGTLVTVSSGGGGSGGGGSGGGGSDIVMTQSPLSLPVTPGEPASISCRSSQSLLHSNGYNYLDWYLQKPGQSPQLLIYLGSNRASGVPDRFSGSGSGTDFTLKISRVEAEDVGVYYCMQALQTPPSFGQGTKVEIKR

SEQ ID NO: 9415 - protein, 240 aa, synthetic construct
QVQLVQSGAEVKKPGSSVKVSCKASGYTFTSYGISWVRQAPGQGLEWMGWINTYSGYTDYAHKFQGRVTITADESTSTAYMELSSLRSEDTAVYYCTTDDFLSFGYWGQGTLVTVSSGGGGSGGGGSGGGGSDIQMTQSPSSLSASVGDRVTITCRASESVSTWLAWYQQKPGKAPKLLIYKASRLESGVPSRFSGSGSGTDFTLTISSLQPEDFATYYCQQSYKTPYTFGQGTKLEIKR

SEQ ID NO: 9416 - protein, 251 aa, synthetic construct
QVQLVQSGAEVKKPGSSVKVSCKASGYMFTDYYIHWVRQAPGQGLEWMGGIIPYFGTANYAQKFQGRVTITADESTSTAYMELSSLRSEDTAVYYCARSISGSYVLDAFDIWGQGTTVTVSSGGGGSGGGGSGGGGSDIVMTQSPDSLAVSLGERATINCKSSQSVLYSSNNKNYLAWYQQKPGQPPKLLIYWASTRESGVPDRFSGSGSGTDFTLTISSLQAEDVAVYYCQQYFTTPLTFGQGTKLEIKR

SEQ ID NO: 9417 - protein, 246 aa, synthetic construct
QVQLVQSGAEVKKPGSSVKVSCKASGYTFNSYGISWVRQAPGQGLEWMGGIIPIFGTANYAQKFQGRVTITADESTSTAYMELSSLRSEDTAVYYCARDWGYGDYADDAFDIWGQGTMVTVSSGGGGSGGGGSGGGGSDIQMTQSPSSLSASVGDRVTITCRASQSISSYLNWYQQKPGKAPKLLIYAASSLQSGVPSRFSGSGSGTDFTLTISSLQPEDFATYYCQQSYSTPYTFGQGTKVEIKR

SEQ ID NO: 9418 - protein, 245 aa, synthetic construct
QVQLVQSGAEVKKPGSSVKVSCKASGGTFSNNDINWVRQAPGQGLEWMGWINPIYGSANYAQNFQGRVTITADESTSTAYMELSSLRSEDTAVYYCAADWRGFDYWGQGTLVTVSSGGGGSGGGGSGGGGSDIVMTQSPDSLAVSLGERATINCKSSQSVLSSSYNKNYLAWYQQKPGQPPKLLIYWASTRASGVPDRFSGSGSGTDFTLTISSLQAEDVAVYYCQQYYDTPLTFGQGTKVEIKR

SEQ ID NO: 9419 - protein, 243 aa, synthetic construct
QVQLVQSGAEVKKPGASVKVSCKASGYTFTEYAIHWVRQAPGQGLEWMGRMNPHNGDTGYAQKFQGRVTMTRDTSTSTVYMELSSLRSEDTAVYYCAREGDYLGYPIDCWGRGTLVTVSSGGGGSGGGGSGGGGSDIQMTQSPSSLSASVGDRVTITCRASQSISSYLNWYQQKPGKAPKLLIYKASTLESGVPSRFSGSGSGTDFTLTISSLQPEDFATYYCQQNDSIPITFGQGTRLEIKR

SEQ ID NO: 9420 - protein, 240 aa, synthetic construct
EVQLLESGGGLVQPGGSLRLSCAASGFTFSDYSMSWVRQAPGKGLEWVAAIWQDGNVKFYADSVKGRFTISRDNSKNTLYLQMNSLRAEDTAVYYCARDGNSGYVFWGQGTLVTVSSGGGGSGGGGSGGGGSDIQMTQSPSSLSASVGDRVTITCRASQSISRWLAWYQQKPGKAPKLLIYDASNLETGVPSRFSGSGSGTDFTLTISSLQPEDFATYYCLQDYSYPLTFGQGTKVEIKR

SEQ ID NO: 9421 - protein, 250 aa, synthetic construct
QVQLVQSGAEVKKPGASVKVSCKASGYTFTTYYMHWVRQAPGQGLEWMGWINPNTGDTAYAQKIQGRVTMTRDTSTSTVYMELSSLRSEDTAVYYCARTAEAVAGLPAFDYWGQGTLVTVSSGGGGSGGGGSGGGGSDIVMTQSPDSLAVSLGERATINCKTSQSVFSTSYNRDYLAWYQQKPGQPPKLLIYWASTRAAGVPDRFSGSGSGTDFTLTISSLQAEDVAVYYCQQYYYTSTFGQGTKVEIKR

SEQ ID NO: 9422 - protein, 241 aa, synthetic construct
QVQLVQSGAEVKKPGSSVKVSCKASGGTSNNYAIDWVRQAPGQGLEWMGGIIPLFGTTTYAQKFQGRVTITADESTSTAYMELSSLRSEDTAVYYCARVTLYGDYDYWGQGTLVTVSSGGGGSGGGGSGGGGSDIQMTQSPSSLSASVGDRVTITCRASQSINRYLNWYQQKPGKAPKLLIYAASSLQSGVPSRFSGSGSGTDFTLTISSLQPEDFATYYCQQANSFPPTFGGGTKVEIKR

SEQ ID NO: 9423 - protein, 241 aa, synthetic construct
QVQLVQSGAEVKKPGASVKVSCKASGYSLITHWMHWVRQAPGQGLEWMGMINPSDGVTYYAQTFQGRVTMTRDTSTSTVYMELSSLRSEDTAVYYCAREYYGEGFDYWGQGTLVTVSSGGGGSGGGGSGGGGSDIQMTQSPSSLSASVGDRVTITCRASQGISNYLAWYQQKPGKAPKLLIYSASNLQSGVPSRFSGSGSGTDFTLTISSLQPEDFATYYCQQSYSTPLTFGGGTKVEIKR

SEQ ID NO: 9424 - protein, 241 aa, synthetic construct
QVQLVQSGAEVKKPGASVKVSCKASGGTFSSYAISWVRQAPGQGLEWMGIINPSGGSTSNAQKFQGRVTMTRDTSTSTVYMELSSLRSEDTAVYYCARDLGDTAMDGWGQGTLVTVSSGGGGSGGGGSGGGGSDIQMTQSPSSLSASVGDRVTITCRASQSIDSYLNWYQQKPGKAPKLLIYKASTLESGVPSRFSGSGSGTDFTLTISSLQPEDFATYYCQQSYSAPLTFGGGTKVEIKR

SEQ ID NO: 9425 - protein, 241 aa, synthetic construct
QVQLVQSGAEVKKPGASVKVSCKASGYTFTSYYLHWVRQAPGQGLEWMGIITPSGGSTTYAHKFQGRVTMTRDTSTSTVYMELSSLRSEDTAVYYCARDGGLASFDYWGQGTLVTVSSGGGGSGGGGSGGGGSDIQMTQSPSSLSASVGDRVTITCRASQDISTWLAWYQQKPGKAPKLLIYDASNLETGVPSRFSGSGSGTDFTLTISSLQPEDFATYYCQQVNSDPYTFGQGTRLEIKR

SEQ ID NO: 9426 - protein, 244 aa, synthetic construct
QVQLVQSGAEVKKPGASVKVSCKASGGTFSSYAISWVRQAPGQGLEWMGWMNPNSGNTGYAQKFQGRVTMTRDTSTSTVYMELSSLRSEDTAVYYCARGGGWAMTDAFDIWGQGTMVTVSSGGGGSGGGGSGGGGSDIQMTQSPSSLSASVGDRVTITCQASQDISNYLNWYQQKPGKAPKLLIYAASTLESGVPSRFSGSGSGTDFTLTISSLQPEDFATYYCQQGDSLPLTFGGGTKVEIKR

SEQ ID NO: 9427 - protein, 247 aa, synthetic construct
EVQLVESGGGLVKPGGSLRLSCAASGFTFDDYGMSWVRQAPGKGLEWVSLIYSGGDTYYADSVKGRFTISRDDSKNTLYLQMNSLKTEDTAVYYCTRKEYYYDSSGYLRLFDYWGQGTLVTVSSGGGGSGGGGSGGGGSDIQMTQSPSSLSASVGDRVTITCRASQGISNYLAWYQQKPGKAPKLLIYAASSLQSGVPSRFSGSGSGTDFTLTISSLQPEDFATYYCQQSDSFPYTFGQGTKVEIKR

SEQ ID NO: 9428 - protein, 246 aa, synthetic construct
QVQLVQSGAEVKKPGSSVKVSCKASGYTFTDYYMHWVRQAPGQGLEWMGGINPIFGTSNYAQKFQGRVTITADESTSTAYMELSSLRSEDTAVYYCARDISGYDYYYYGMDVWGQGTTVTVSSGGGGSGGGGSGGGGSEIVMTQSPATLSVSPGERATLSCRASQSVSTYLAWYQQKPGQAPRLLIYGASTRATGIPARFSGSGSGTEFTLTISSLQSEDFAVYYCQQHDSYPLTFGGGTKVEIKR

SEQ ID NO: 9429 - protein, 247 aa, synthetic construct
QVQLVQSGAEVKKPGASVKVSCKASGGTLNNYAFSWVRQAPGQGLEWMGMIDPSDGTIAYAQKFQGRVTMTRDTSTSTVYMELSSLRSEDTAVYYCARSDYDFWSGLGGYFDYWGQGTLVTVSSGGGGSGGGGSGGGGSDIQMTQSPSSLSASVGDRVTITCRASQGIRNDLGWYQQKPGKAPKLLIYAASSLQSGVPSRFSGSGSGTDFTLTISSLQPEDFATYYCQQANSFPPTFGQGTRLEIKR

SEQ ID NO: 9430 - protein, 245 aa, synthetic construct
QVQLVQSGAEVKKPGASVKVSCKASGGTFSSYAISWVRQAPGQGLEWMGTIDPNSGGTMFAQKFQGRVTMTRDTSTSTVYMELSSLRSEDTAVYYCARDSAEWELGGSFDYWGQGTLVTVSSGGGGSGGGGSGGGGSDIQMTQSPSSLSASVGDRVTITCRASESISTYLNWYQQKPGKAPKLLIYKASNLESGVPSRFSGSGSGTDFTLTISSLQPEDFATYYCQQTDSTFITFGQGTKVEIKR

SEQ ID NO: 9431 - protein, 246 aa, synthetic construct
EVQLLESGGGLVQPGGSLRLSCAASGFTFSNHYTSWVRQAPGKGLEWVSSIGVNGDTYYLDSVKGRFTISRDNSKNTLYLQMNSLRAEDTAVYYCAREGLVFSGRGHWYFDLWGRGTLVTVSSGGGGSGGGGSGGGGSDIQMTQSPSSLSASVGDRVTITCRASRNIHDYLNWYQQKPGKAPKLLIYAASTLQTGVPSRFSGSGSGTDFTLTISSLQPEDFATYYCQQTYSTPPTFGPGTKVDIKR

SEQ ID NO: 9432 - protein, 241 aa, synthetic construct
QVQLVQSGAEVKKPGASVKVSCKASGGTFSNYAISWVRQAPGQGLEWMGRINPNGGNTSNAQKFQGRVTMTRDTSTSTVYMELSSLRSEDTAVYYCARDYEDADFDGWGQGTLVTVSSGGGGSGGGGSGGGGSDIQMTQSPSSLSASVGDRVTITCRASQSNDSYLNWYQQKPGKAPKLLIYKASTLESGVPSRFSGSGSGTDFTLTISSLQPEDFATYYCQQSYSSPLTFGQGTKVEIKR

SEQ ID NO: 9433 - protein, 240 aa, synthetic construct
QVQLVQSGAEVKKPGASVKVSCKASGYTFSDHHVHWVRQAPGQGLEWMGWMNPDSGNTGYAQRFQGRVTMTRDTSTSTVYMELSSLRSEDTAVYYCARDSTSGVDYWGQGTLVTVSSGGGGSGGGGSGGGGSDIQMTQSPSSLSASVGDRVTITCRASQSISDFLNWYQQKPGKAPKLLIYAASTLQSGVPSRFSGSGSGTDFTLTISSLQPEDFATYYCQQSYSSPYTFGQGTKVEIKR

SEQ ID NO: 9434 - protein, 248 aa, synthetic construct
EVQLLESGGGLVQPGGSLRLSCAASGFTFSSYAMSWVRQAPGKGLEWVAVISYDGHDQFYADSVKGRFTISRDNSKNTLYLQMNSLRAEDTAVYYCARGEQQLEGFYYYYGMDVWGQGTTVTVSSGGGGSGGGGSGGGGSDIQMTQSPSSLSASVGDRVTITCQASQDISNYLNWYQQKPGKAPKLLIYAASSLQSGVPSRFSGSGSGTDFTLTISSLQPEDFATYYCQQANRFPLTFGQGTKLEIKR

SEQ ID NO: 9435 - protein, 242 aa, synthetic construct
EVQLLESGGGLVQPGGSLRLSCAASGFTFSSYWMHWVRQAPGKGLEWVAVISYDGSKEYYADSVKGRFTISRDNSKNTLYLQMNSLRAEDTAVYYCASDYGDYGTYDYWGQGTLVTVSSGGGGSGGGGSGGGGSDIQMTQSPSSLSASVGDRVTITCQASQDISNYLNWYQQKPGKAPKLLIYKASNLQSGVPSRFSGSGSGTDFTLTISSLQPEDFATYYCQQSYNFPATFGQGTRLEIKR

SEQ ID NO: 9436 - protein, 253 aa, synthetic construct
EVQLLESGGGLVQPGGSLRLSCAASGFTFSSYWMHWVRQAPGKGLEWVSGISGGGDDTYYADSVKGRFTISRDNSKNTLYLQMNSLRAEDTAVYYCAREPLAYCGGDCPGGFDYWGQGTLVTVSSGGGGSGGGGSGGGGSDIVMTQSPLSLPVTPGEPASISCRSSQSLLHSNGYNYLDWYLQKPGQSPQLLIYLGSNRASGVPDRFSGSGSGTDFTLKISRVEAEDVGVYYCMQGTHWPETFGQGTKVEIKR

SEQ ID NO: 9437 - protein, 241 aa, synthetic construct
EVQLLESGGGLVQPGGSLRLSCAASGFTFSDHYMDWVRQAPGKGLEWVSAIGTGGDTYYADSVKGRFTISRDNSKNTLYLQMNSLRAEDTAVYYCARHEDTAIFLDYWGQGTLVTVSSGGGGSGGGGSGGGGSDIQMTQSPSSLSASVGDRVTITCRASQSISSYLNWYQQKPGKAPKLLIYDASNLETGVPSRFSGSGSGTDFTLTISSLQPEDFATYYCQQSYSTPLTFGQGTKLEIKR

SEQ ID NO: 9438 - protein, 244 aa, synthetic construct
QVQLVQSGAEVKKPGASVKVSCKASGYTFTSYYMHWVRQAPGQGLEWMGMISPSDGSTTYAPKFQGRVTMTRDTSTSTVYMELSSLRSEDTAVYYCARDGYDAWSYGMDVWGQGTMVTVSSGGGGSGGGGSGGGGSDIQMTQSPSSLSASVGDRVTITCRASQGISDYLAWYQQKPGKAPKLLIYDASNLETGVPSRFSGSGSGTDFTLTISSLQPEDFATYYCQQSYILPLTFGGGTKVEIKR

SEQ ID NO: 9439 - protein, 240 aa, synthetic construct
QVQLVQSGAEVKKPGSSVKVSCKASGYTFTGYYMHWVRQAPGQGLEWMGWMNPNSGNTGYAQKFQGRVTITADESTSTAYMELSSLRSEDTAVYYCARDGVTGTDYWGQGTLVTVSSGGGGSGGGGSGGGGSDIQMTQSPSSLSASVGDRVTITCRASQDINDFLAWYQQKPGKAPKLLIYAASSLQSGVPSRFSGSGSGTDFTLTISSLQPEDFATYYCQQSYSAPYTFGQGTKLEIKR

SEQ ID NO: 9440 - protein, 245 aa, synthetic construct
EVQLLESGGGLVQPGGSLRLSCAASGFAFSSYVLHWVRQAPGKGLEWVSAISGAGDSTYYADSVKGRFTISRDNSKNTLYLQMNSLRAEDTAVYYCAREPTTVTDDWYFDLWGRGTLVTVSSGGGGSGGGGSGGGGSDIQMTQSPSSLSASVGDRVTITCRASQSISNWLAWYQQKPGKAPKLLIYAASKLESGVPSRFSGSGSGTDFTLTISSLQPEDFATYYCQQSYSSPWTFGQGTRLEIKR

SEQ ID NO: 9441 - protein, 241 aa, synthetic construct
EVQLVESGGGLVKPGGSLRLSCAASGFAFSSHWMHWVRQAPGKGLEWVSAISGNGDNSYYADSVKGRFTISRDDSKNTLYLQMNSLKTEDTAVYYCARDRAPEYFDLWGRGTLVTVSSGGGGSGGGGSGGGGSDIQMTQSPSSLSASVGDRVTITCRASQGIDSWLAWYQQKPGKAPKLLIYAASTLESGVPSRFSGSGSGTDFTLTISSLQPEDFATYYCQQAYSFPLTFGGGTKVEIKR

SEQ ID NO: 9442 - protein, 244 aa, synthetic construct
QVQLVQSGAEVKKPGASVKVSCKASGGTFSSYAISWVRQAPGQGLEWMGWINPNSGGTNYAQKFQGRVTMTRDTSTSTVYMELSSLRSEDTAVYYCARDDYGDYGGGMDVWGQGTTVTVSSGGGGSGGGGSGGGGSDIQMTQSPSSLSASVGDRVTITCRASQNIGTWLAWYQQKPGKAPKLLIYRASSLESGVPSRFSGSGSGTDFTLTISSLQPEDFATYYCQQAYSFPWTFGQGTKLEIKR

SEQ ID NO: 9443 - protein, 245 aa, synthetic construct
QVQLVQSGAEVKKPGASVKVSCKASGYTFTDYYMHWVRQAPGQGLEWMGWMNPNSGHTGYAEKFQGRVTMTRDTSTSTVYMELSSLRSEDTAVYYCAKDTSPRYGDGFFDYWGQGTLVTVSSGGGGSGGGGSGGGGSDIQMTQSPSSLSASVGDRVTITCRASQNINNWLAWYQQKPGKAPKLLIYKASTLQSGVPSRFSGSGSGTDFTLTISSLQPEDFATYYCQQADSFPPTFGQGTKVEIKR

SEQ ID NO: 9444 - protein, 243 aa, synthetic construct
EVQLLESGGGLVQPGGSLRLSCAASGFTFSSYWMHWVRQAPGKGLEWVAVTSYDGSNKYYADSVKGRFTISRDNSKNTLYLQMNSLRAEDTAVYYCARESGFSAEYFQHWGQGTLVTVSSGGGGSGGGGSGGGGSDIQMTQSPSSLSASVGDRVTITCRASQDISSYLAWYQQKPGKAPKLLIYAASTLQSGVPSRFSGSGSGTDFTLTISSLQPEDFATYYCQQLNRYPITFGQGTKVEIKR

SEQ ID NO: 9445 - protein, 245 aa, synthetic construct
QVQLVQSGAEVKKPGASVKVSCKASGGTFSSYAISWVRQAPGQGLEWMGIINPSGGSTSYAQKFQGRVTMTRDTSTSTVYMELSSLRSEDTAVYYCARATGLYCSGSCFDYWGQGTLVTVSSGGGGSGGGGSGGGGSDIQMTQSPSSLSASVGDRVTITCRASQDISNYLAWYQQKPGKAPKLLIYAASILHSGVPSRFSGSGSGTDFTLTISSLQPEDFATYYCQQYDSSFITFGQGTRLEIKR

SEQ ID NO: 9446 - skipped

SEQ ID NO: 9447 - protein, 118 aa, synthetic construct
QVQLVQSGAEVKKPGASVKVSCKASGGTFSSYAISWVRQAPGQCLEWMGWINPNSGGTNYAQKFQGRVTMTRDTSTSTVYMELSSLRSEDTAVYYCARDGYSGSYSDWGQGTLVTVSS

SEQ ID NO: 9448 - protein, 122 aa, synthetic construct
QVQLVQSGAEVKKPGSSVKVSCKASGYTFTSYDINWVRQAPGQCLEWMGGIIPLSGAPNYAHKFQGRVTITADESTSTAYMELSSLRSEDTAVYYCARGALYNWNDGWFDPWGQGTLVTVSS

SEQ ID NO: 9449 - protein, 118 aa, synthetic construct
QVQLVQSGAEVKKPGASVKVSCKASGYSLITHWMHWVRQAPGQCLEWMGMINPSDGVTYYAQTFQGRVTMTRDTSTSTVYMELSSLRSEDTAVYYCAREYYGEGFDYWGQGTLVTVSS

SEQ ID NO: 9450 - protein, 119 aa, synthetic construct
QVQLVQSGAEVKKPGSSVKVSCKASGYTFSDHHVHWVRQAPGQGLEWMGGIIPIFGTANYAQKFQGRVTITADESTSTAYMELSSLRSEDTAVYYCARGSSWYLHFQHWGQGTLVTVSS

SEQ ID NO: 9451 - protein, 117 aa, synthetic construct
QVQLVQSGAEVKKPGASVKVSCKASGGTFSRYGIAWVRQAPGQGLEWMGISYPSDGSTSSAQKLQGRVTMTRDTSTSTVYMELSSLRSEDTAVYYCARDRLGDLDYWGQGTLVTVSS

SEQ ID NO: 9452 - protein, 126 aa, synthetic construct
QVQLVQSGAEVKKPGSSVKVSCKASGYTFTDYYVHWVRQAPGQGLEWVGWISTFTGNTDYAQNFQGRVTITADESTSTAYMELSSLRSEDTAVYYCARDAPLAAAGTDYYYGMDVWGQGTTVTVSS

SEQ ID NO: 9453 - protein, 117 aa, synthetic construct
QVQLVQSGAEVKKPGASVKVSCKASGGTFSSYALSWVRQAPGQGLEWMGIINPSGGTNYAQKFQGRVTMTRDTSTSTVYMELSSLRSEDTAVYYCARDLGDPGMDVWGQGTLVTVSS

SEQ ID NO: 9454 - protein, 118 aa, synthetic construct
QVQLVQSGAEVKKPGASVKVSCKASGGTFSSYAISWVRQAPGQGLEWMGWINPNSGGTNYAQKFQGRVTMTRDTSTSTVYMELSSLRSEDTAVYYCARDGYSGSYSDWGQGTLVTVSS

SEQ ID NO: 9455 - protein, 117 aa, synthetic construct; identical to SEQ ID NO: 9453

SEQ ID NO: 9456 - protein, 118 aa, synthetic construct
QVQLVQSGAEVKKPGASVKVSCKASGGTFSNYAISWVRQAPGQGLEWMGIIDPSGGSTTYAQKFQGRVTMTRDTSTSTVYMELSSLRSEDTAVYYCARDLGDMGMDVWGQGTTVTVSS

SEQ ID NO: 9457 - protein, 118 aa, synthetic construct
QVQLVQSGAEVKKPGASVKVSCKASGGTFSNYAFSWVRQAPGQGLEWMGIINPSGGSTSYAQKFQGRVTMTRDTSTSTVYMELSSLRSEDTAVYYCARDVGDRGMDVWGQGTTVTVSS

SEQ ID NO: 9458 - protein, 121 aa, synthetic construct
QVQLVQSGAEVKKPGASVKVSCKASGSTFSGYYMHWVRQAPGQGLEWMGWIDPNGGGTQYAQKFQGRVTMTRDTSTSTVYMELSSLRSEDTAVYYCAKDIVHDGTEYFQHWGQGTLVTVSS

SEQ ID NO: 9459 - protein, 121 aa, synthetic construct
QVQLVQSGAEVKKPGASVKVSCKASGYTFTSYYMHWVRQAPGQGLEWMGIINPSGGSTSYAQKFQGRVTMTRDTSTSTVYMELSSLRSEDTAVYYCAKDIVHDGTEYFQHWGQGTLVTVSS

SEQ ID NO: 9460 - protein, 119 aa, synthetic construct
QVQLVQSGAEVKKPGASVKVSCKASGGTFSSYAISWVRQAPGQGLEWMGIINPSGGSTNYAQKFQGRVTMTRDTSTSTVYMELSSLRSEDTAVYYCAREGRDHDAFDIWGQGTMVTVSS

SEQ ID NO: 9461 - protein, 119 aa, synthetic construct
QVQLVQSGAEVKKPGASVKVSCKASGFTFTDYGISWVRQAPGQGLEWMGIINPSGGSTSYAQKFQGRVTMTRDTSTSTVYMELSSLRSEDTAVYYCAREGRSHDAFDIWGQGTMVTVSS

SEQ ID NO: 9462 - protein, 124 aa, synthetic construct
QVQLVQSGAEVKKPGASVKVSCKASGYTFTGYYMHWVRQAPGQGLEWMGWMNPHSGDTGYAQKFQGRVTMTRDTSTSTVYMELSSLRSEDTAVYYCARWVGTTEYYYYYYMDVWGKGTTVTVSS

SEQ ID NO: 9463 - protein, 123 aa, synthetic construct
QVQLVQSGAEVKKPGASVKVSCKASGYTFTDYYLHWVRQAPGQGLEWMGIIDPSGGSTSIAQKFQGRVTMTRDTSTSTVYMELSSLRSEDTAVYYCATTAYYDFWSGYSMDVWGKGTTVTVSS

SEQ ID NO: 9464 - protein, 124 aa, synthetic construct
QVQLVQSGAEVKKPGASVKVSCKASGYTFTSHYMHWVRQAPGQGLEWMGIIDPSGGSTSYAQEFQGRVTMTRDTSTSTVYMELSSLRSEDTAVYYCARDMDNWNTGYYYYMDVWGKGTTVTVSS

SEQ ID NO: 9465 - protein, 119 aa, synthetic construct
QVQLVQSGAEVKKPGASVKVSCKASGGTFSSYAINWVRQAPGQGLEWMGWVNPNSGDTAYAQKFQGRVTMTRDTSTSTVYMELSSLRSEDTAVYYCARDQRGGDAWDVWGKGTTVTVSS

SEQ ID NO: 9466 - protein, 117 aa, synthetic construct
QVQLVQSGAEVKKPGSSVKVSCKASGGTFSNYAISWVRQAPGQGLEWMGIITPSGGSTTYAHKFQGRVTITADESTSTAYMELSSLRSEDTAVYYCARDTAGHFDIWGQGTLVTVSS

SEQ ID NO: 9467 - protein, 119 aa, synthetic construct
QVQLVQSGAEVKKPGASVKVSCKASGGTFRNDVINWVRQAPGQGLEWIGWMNPNSGNTGYAQKFQGRVTMTRDTSTSTVYMELSSLRSEDTAVYYCARDNPDLDGMDVWGQGTLVTVSS

SEQ ID NO: 9468 - protein, 117 aa, synthetic construct
QVQLVQSGAEVKKPGASVKVSCKASGGTFSSYAINWVRQAPGQGLEWLGWISAYNGNTNYAQKFQGRVTMTRDTSTSTVYMELSSLRSEDTAVYYCARDLVGHFDYWGQGTLVTVSS

SEQ ID NO: 9469 - protein, 118 aa, synthetic construct; identical to SEQ ID NO: 9454

SEQ ID NO: 9470 - protein, 119 aa, synthetic construct
QVQLVQSGAEVKKPGASVKVSCKASGNTLSSHAISWVRQAPGQGLEWMGIINPSGGSTSYAQKFQGRVTMTRDTSTSTVYMELSSLRSEDTAVYYCARDQGSSGTFDYWGQGTLVTVSS

SEQ ID NO: 9471 - protein, 117 aa, synthetic construct
QVQLVQSGAEVKKPGASVKVSCKASGGTLSSYAISWVRQAPGQGLEWMGWINPNSGGTNYAQKFQGRVTMTRDTSTSTVYMELSSLRSEDTAVYYCARDSTDVIDYWGQGTLVTVSS

SEQ ID NO: 9472 - protein, 127 aa, synthetic construct
QVQLVQSGAEVKKPGASVKVSCKASGYIFTSYDINWVRQAPGQGLEWMGWINPNSGDTKYAQNFQGRVTMTRDTSTSTVYMELSSLRSEDTAVYYCARDGGTVTPTEEYYYYGMDVWGQGTLVTVSS

SEQ ID NO: 9473 - protein, 115 aa, synthetic construct
QVQLVQSGAEVKKPGASVKVSCKASGGTFSSYAISWVRQAPGQGLEWMGWISVYNGNTNYAQNLQGRVTMTRDTSTSTVYMELSSLRSEDTAVYYCASLDDLDYWGQGTLVTVSS

SEQ ID NO: 9474 - protein, 121 aa, synthetic construct
QVQLVQSGAEVKKPGASVKVSCKASGHTFTSYYIHWVRQAPGQGLEWMGWINPNNGGTHYAQKFQGRVTMTRDTSTSTVYMELSSLRSEDTAVYYCARDMVRDSAEYFQHWGQGTLVTVSS

SEQ ID NO: 9475 - protein, 118 aa, synthetic construct
QVQLVQSGAEVKKPGSSVKVSCKASGYTFITSYIHWVRQAPGQGLEWMGMINPSGGTTTYAQKFQGRVTITADESTSTAYMELSSLRSEDTAVYYCARDSSGYPIDYWGQGTLVTVSS

SEQ ID NO: 9476 - protein, 122 aa, synthetic construct
QVQLVQSGAEVKKPGSSVKVSCKASGYTFTSYDINWVRQAPGQGLEWMGGIIPLSGAPNYAHKFQGRVTITADESTSTAYMELSSLRSEDTAVYYCARGALYNWNDGWFDPWGQGTLVTVSS

SEQ ID NO: 9477 - protein, 120 aa, synthetic construct
EVQLLESGGGLVQPGGSLRLSCAASGFTVGSWYMSWVRQAPGKGLEWVAGIWYEGSNKYYADSVKGRFTISRDNSKNTLYLQMNSLRAEDTAVYYCARLGTASLPYFDYWGQGTLVTVSS

SEQ ID NO: 9478 - protein, 117 aa, synthetic construct
QVQLVQSGAEVKKPGASVKVSCKASGYTFTGYYMHWVRQAPGQGLEWVGWINPNRGDTKYAQKFQGRVTMTRDTSTSTVYMELSSLRSEDTAVYYCARESGDGFDPWGQGTLVTVSS

SEQ ID NO: 9479 - protein, 117 aa, synthetic construct
QVQLVQSGAEVKKPGSSVKVSCKASGYTFTNYYIHWVRQAPGQGLEWMGWMNPNSGNTGYAQKFQGRVTITADESTSTAYMELSSLRSEDTAVYYCARDWPNWFDPWGQGTLVTVSS

SEQ ID NO: 9480 - protein, 118 aa, synthetic construct
QVQLVQSGAEVKKPGASVKVSCKASGYSFTDNYIHWVRQAPGQGLEWMGWIRSDNGETSYAQKFQGRVTMTRDTSTSTVYMELSSLRSEDTAVYYCAREVQLVGFDYWGQGTLVTVSS

SEQ ID NO: 9481 - protein, 119 aa, synthetic construct; identical to SEQ ID NO: 9450

SEQ ID NO: 9482 - protein, 122 aa, synthetic construct
QVQLVQSGAEVKKPGSSVKVSCKASGGTFSSYAIYWVRQAPGQGLEWMGGIIPIFGTTNYAQKFQGRVTITADESTSTAYMELSSLRSEDTAVYYCAKGVDRYNWNDAFDYWGQGTLVTVSS

SEQ ID NO: 9483 - protein, 120 aa, synthetic construct
QVQLVQSGAEVKKPGASVKVSCKASGYTFTDYYMHWVRQAPGQGLEWMGWIHSNSGGTHSAQKFQGRVTMTRDTSTSTVYMELSSLRSEDTAVYYCARESSGYDSSLDYWGQGTLVTVSS

SEQ ID NO: 9484 - protein, 120 aa, synthetic construct
QVQLVQSGAEVKKPGASVKVSCKASGGTFSSYGISWVRQAPGQGLEWVGWINPNSGDTDYAQKFQGRVTMTRDTSTSTVYMELSSLRSEDTAVYYCTTDPRLDSSDPGYWGQGTLVTVSS

SEQ ID NO: 9485 - protein, 114 aa, synthetic construct
QVQLVQSGAEVKKPGASVKVSCKASGGTFGNYGINWVRQAPGQGLEWMGWISAYNGNTNYAQKFQGRVTMTRDTSTSTVYMELSSLRSEDTAVYYCARGGMDVWGQGTLVTVSS

SEQ ID NO: 9486 - protein, 117 aa, synthetic construct; identical to SEQ ID NO: 9451

SEQ ID NO: 9487 - protein, 120 aa, synthetic construct
QVQLVQSGAEVKKPGASVKVSCKASGGTFSSYAISWVRQAPGQGLEWMGWMNPNSGNTGYAQKFQGRVTMTRDTSTSTVYMELSSLRSEDTAVYYCARDSIVGGYPFDYWGQGTLVTVSS

SEQ ID NO: 9488 - protein, 123 aa, synthetic construct
QVQLVQSGAEVKKPGSSVKVSCKASGYTFTSYDINWVRQAPGQGLEWMGTITPIFGTTDYAQKFQGRVTITADESTSTAYMELSSLRSEDTAVYYCAREGYSSSWHDDAFDIWGQGTLVTVSS

SEQ ID NO: 9489 - protein, 118 aa, synthetic construct
QVQLVQSGAEVKKPGASVKVSCKASGGTFSNYAISWVRQAPGQGLEWMGIIDPSGGSTSYAQKFQGRVTMTRDTSTSTVYMELSSLRSEDTAVYYCARDLGDYGLDSWGQGTLVTVSS

SEQ ID NO: 9490 - protein, 125 aa, synthetic construct
QVQLVQSGAEVKKPGASVKVSCKASGYTFTGYYMHWVRQAPGQGLEWMGWMNPNSGDTGYAQRFQGRVTMTRDTSTSTVYMELSSLRSEDTAVYYCATGGSDSSGYYYEGYFQHWGQGTLVTVSS

SEQ ID NO: 9491 - protein, 123 aa, synthetic construct
QVQLVQSGAEVKKPGASVKVSCKASGGTFSSYAISWVRQAPGQGLEWLGYMSPNSGNTGYAQKFQGRVTMTRDTSTSTVYMELSSLRSEDTAVYYCARDKGGYYDSSGYYWYWGQGTLVTVSS

SEQ ID NO: 9492 - protein, 122 aa, synthetic construct
EVQLLESGGGLVQPGGSLRLSCAASGFSLSSYEMHWVRQAPGKGLEWVSAISSNGGSTYYADSVKGRFTISRDNSKNTLYLQMNSLRAEDTAVYYCARVGDGDGYNPDFDYWGQGTLVTVSS

SEQ ID NO: 9493 - protein, 119 aa, synthetic construct
QVQLVQSGAEVKKPGSSVKVSCKASGYTFTSYGISWVRQAPGQGLEWMGWIDPTSGATDTAHKFQGRVTITADESTSTAYMELSSLRSEDTAVYYCAKDPIVATEVDYWGQGTLVTVSS

SEQ ID NO: 9494 - protein, 116 aa, synthetic construct
QVQLVQSGAEVKKPGASVKVSCKASGGTFSSYAISWVRQAPGQGLEWMGWMSPNSGNTGYAQKFQGRVTMTRDTSTSTVYMELSSLRSEDTAVYYCARDSGAFDIWGQGTMVTVSS

SEQ ID NO: 9495 - protein, 118 aa, synthetic construct
QVQLVQSGAEVKKPGASVKVSCKASGVTISNYAISWVRQAPGQGLEWMGWMNPNSGNTGYAQKFQGRVTMTRDTSTSTVYMELSSLRSEDTAVYYCAREGLLDAFDIWGQGTMVTVSS

SEQ ID NO: 9496 - protein, 119 aa, synthetic construct
QVQLVQSGAEVKKPGASVKVSCKASGGTFSRYGITWVRQAPGQGLEWMGWMNPYDGNTGYAQKFQGRVTMTRDTSTSTVYMELSSLRSEDTAVYYCARGGRHHDAFDIWGQGTMVTVSS

SEQ ID NO: 9497 - protein, 118 aa, synthetic construct
QVQLVQSGAEVKKPGASVKVSCKASGGTFSSYAISWVRQAPGQGLEWMGIINPSGDGTNYAQKFQGRVTMTRDTSTSTVYMELSSLRSEDTAVYYCARDISNDAFDIWGQGTMVTVSS

SEQ ID NO: 9498 - protein, 119 aa, synthetic construct
QVQLVQSGAEVKKPGASVKVSCKASGYILTGHYMHWVRQAPGQGLEWMGWISAYNGDTNYAQKFQGRVTMTRDTSTSTVYMELSSLRSEDTAVYYCARGSSWDDAFDIWGQGTMVTVSS

SEQ ID NO: 9499 - protein, 118 aa, synthetic construct
EVQLVESGGGLVKPGGSLRLSCAASGFTFSNHYTSWVRQAPGKGLEWVSAIGAGGGTYYADSVKGRFTISRDDSKNTLYLQMNSLKTEDTAVYYCAREGWNDDVFDIWGQGTMVTVSS

SEQ ID NO: 9500 - protein, 118 aa, synthetic construct
QVQLVQSGAEVKKPGASVKVSCKASGGTFSSYAISWVRQAPGQGLEWVGIINPSAGTTYYAERFQGRVTMTRDTSTSTVYMELSSLRSEDTAVYYCARDGNFGAFDIWGQGTMVTVSS

SEQ ID NO: 9501 - protein, 127 aa, synthetic construct
QVQLVQSGAEVKKPGSSVKVSCKASGYSFTTYAITWVRQAPGQGLEWMGEIIPIFGTANYAQKFQGRVTITADESTSTAYMELSSLRSEDTAVYYCARDKSGWNYGSGSYNDAFDIWGQGTMVTVSS

SEQ ID NO: 9502 - protein, 117 aa, synthetic construct
QVQLVQSGAEVKKPGASVKVSCKASGYAFTGYYMHWVRQAPGQGLEWMGWMNPNSGKTEYAQKFQGRVTMTRDTSTSTVYMELSSLRSEDTAVYYCARDGGLDFDYWGQGTMVTVSS

SEQ ID NO: 9503 - protein, 120 aa, synthetic construct
QVQLVQSGAEVKKPGASVKVSCKASGYTFTTYYIHWVRQAPGQGLEWMGWMNPNTGDTGSAQKFQGRVTMTRDTSTSTVYMELSSLRSEDTAVYYCAKDPAVTPDAFDIWGQGTMVTVSS

SEQ ID NO: 9504 - protein, 118 aa, synthetic construct
QVQLVQSGAEVKKPGASVKVSCKASGGTLSSYAISWVRQAPGQGLEWMGIIDPSGGGTSYAQKLQGRVTMTRDTSTSTVYMELSSLRSEDTAVYYCAGSLYYYGMDVWGQGTMVTVSS

SEQ ID NO: 9505 - protein, 121 aa, synthetic construct
QVQLVQSGAEVKKPGSSVKVSCKASGGTFGSSAISWVRQAPGQGLEWMGGIIPIFGTANYAQKFQGRVTITADESTSTAYMELSSLRSEDTAVYYCAKEDDILPPRAFDIWGQGTMVTVSS

SEQ ID NO: 9506 - protein, 121 aa, synthetic construct
EVQLLESGGGLVQPGGSLRLSCAASGFTFDDYAMHWVRQAPGKGLEWVSGISGGGGVTYYADSVKGRFTISRDNSKNTLYLQMNSLRAEDTAVYYCARVYSSGWLDAFDIWGQGTMVTVSS

SEQ ID NO: 9507 - protein, 119 aa, synthetic construct
QVQLVQSGAEVKKPGASVKVSCKASGGTFSSYAISWVRQAPGQGLEWMGWISGYNGNTNYAQKFQGRVTMTRDTSTSTVYMELSSLRSEDTAVYYCASSDVSPDAFDIWGQGTTVTVSS

SEQ ID NO: 9508 - protein, 120 aa, synthetic construct
QVQLVQSGAEVKKPGASVKVSCKASGGTQNIYAITWVRQAPGQGLEWVGWVNPNSGNTGYSQKFQGRVTMTRDTSTSTVYMELSSLRSEDTAVYYCATPTSSSDDAFDIWGQGTTVTVSS

SEQ ID NO: 9509 - protein, 119 aa, synthetic construct
QVQLVQSGAEVKKPGSSVKVSCKASGGTFSSYAISWVRQAPGQGLEWMGWINPNSGGTNYAQKFQGRVTITADESTSTAYMELSSLRSEDTAVYYCARASRGDDAFDIWGQGTTVTVSS

SEQ ID NO: 9510 - protein, 129 aa, synthetic construct
QVQLVQSGAEVKKPGASVKVSCKASGIPFTSDDINWVRQAPGQGLEWMGIINPSGGSTSYAQKFQGRVTMTRDTSTSTVYMELSSLRSEDTAVYYCARERYEGGYSSGPGNYYYGMDVWGQGTTVTVSS

SEQ ID NO: 9511 - protein, 118 aa, synthetic construct
QVQLVQSGAEVKKPGASVKVSCKASGGTFSNYAISWVRQAPGQGLEWMGWMNPNSGNTGYAQKFQGRVTMTRDTSTSTVYMELSSLRSEDTAVYYCARDDDYGDYPVWGQGTTVTVSS

SEQ ID NO: 9512 - protein, 119 aa, synthetic construct
QVQLVQSGAEVKKPGASVKVSCKASGDTFSDHAINWVRQAPGQGLEWMGWMNPKIGNTGYAQKFQGRVTMTRDTSTSTVYMELSSLRSEDTAVYYCVYDSSGYDAFDIWGQGTTVTVSS

SEQ ID NO: 9513 - protein, 129 aa, synthetic construct
QVQLVQSGAEVKKPGASVKVSCKASGYTFTSYDINWVRQAPGQGLEWMGRINPGTGGTDYAHKFQGRVTMTRDTSTSTVYMELSSLRSEDTAVYYCARETPSDYYDSSGYYYNDAFDIWGQGTTVTVSS

SEQ ID NO: 9514 - protein, 116 aa, synthetic construct
QVQLVQSGAEVKKPGSSVKVSCKASGGTFSSYAISWVRQAPGQGLEWVGIIIPSGGTNYAQTFQGRVTITADESTSTAYMELSSLRSEDTAVYYCARDLGTTFDIWGQGTTVTVSS

SEQ ID NO: 9515 - protein, 122 aa, synthetic construct
QVQLVQSGAEVKKPGASVKVSCKASGYTFTAYYLHWVRQAPGQGLEWIGWINPDNDNAYYAQKFQGRVTMTRDTSTSTVYMELSSLRSEDTAVYYCAKDIAVAALAYGMDVWGQGTTVTVSS

SEQ ID NO: 9516 - protein, 120 aa, synthetic construct
EVQLLESGGGLVQPGGSLRLSCAASGFTFSSYAMSWVRQAPGKGLEWVAVISYDGSDQYYADSVKGRFTISRDNSKNTLYLQMNSLRAEDTAVYYCARQSLYYYYGMDVWGQGTTVTVSS

SEQ ID NO: 9517 - protein, 126 aa, synthetic construct; identical to SEQ ID NO: 9452

SEQ ID NO: 9518 - protein, 120 aa, synthetic construct
EVQLLESGGGLVQPGGSLRLSCAASGFTFSSYAMSWVRQAPGKGLEWVAFISDDGITKYYADSVKGRFTISRDNSKNTLYLQMNSLRAEDTAVYYCARDDSSGYGGMDVWGQGTTVTVSS

SEQ ID NO: 9519 - protein, 121 aa, synthetic construct
EVQLLESGGGLVQPGGSLRLSCAASGFTFSSYAMHWVRQAPGKGLEWVAVISYDGGDKYYADSVKGRFTISRDNSKNTLYLQMNSLRAEDTAVYYCASGSLVLGYYYMDVWGQGTTVTVSS

SEQ ID NO: 9520 - protein, 121 aa, synthetic construct
QVQLVQSGAEVKKPGASVKVSCKASGYTFTNYYIHWVRQAPGQGLEWMGWINPNTGGTDYAQKFQGRVTMTRDTSTSTVYMELSSLRSEDTAVYYCATGGGGSYYDAFDVWGQGTTVTVSS

SEQ ID NO: 9521 - protein, 119 aa, synthetic construct
QVQLVQSGAEVKKPGASVKVSCKASGGTFSSYAISWVRQAPGQGLEWMGRINPNSGNTGYAQKFQGRVTMTRDTSTSTVYMELSSLRSEDTAVYYCARDIGEGYSMDVWGQGTTVTVSS

SEQ ID NO: 9522 - protein, 126 aa, synthetic construct
EVQLLESGGGLVQPGGSLRLSCAASGFTFSNHYTSWVRQAPGKGLEWVAVISYDGSNKYYADSVKGRFTISRDNSKNTLYLQMNSLRAEDTAVYYCAREEKYSSSWYVGVDAFDIWGQGTTVTVSS

SEQ ID NO: 9523 - protein, 125 aa, synthetic construct
EVQLLESGGGLVQPGGSLRLSCAASGFTFSSSAMHWVRQAPGKGLEWISSISGSGDNAYYADSVKGRFTISRDNSKNTLYLQMNSLRAEDTAVYYCARDQEDYYYDSSGYGMDVWGQGTTVTVSS

SEQ ID NO: 9524 - protein, 126 aa, synthetic construct
QVQLVQSGAEVKKPGSSVKVSCKASGGTFSSHAISWVRQAPGQGLEWMGGIIPIFGTANYAQKFQGRVTITADESTSTAYMELSSLRSEDTAVYYCAKGDWGIVVVPAAIGAFDIWGQGTTVTVSS

SEQ ID NO: 9525 - protein, 126 aa, synthetic construct
QVQLVQSGAEVKKPGSSVKVSCKASGYTFTAYYMHWVRQAPGQGLEWVGRISPVFGSTTYAQRFQGRVTITADESTSTAYMELSSLRSEDTAVYYCARDLGYYDSSGYRYDAFDIWGQGTTVTVSS

SEQ ID NO: 9526 - protein, 118 aa, synthetic construct
QVQLVQSGAEVKKPGSSVKVSCKASGYTFTSYDINWVRQAPGQGLEWMGGISPMFGTANYAQKFQGRVTITADESTSTAYMELSSLRSEDTAVYYCAKDGWYYGMDVWGQGTTVTVSS

SEQ ID NO: 9527 - protein, 121 aa, synthetic construct
QVQLVQSGAEVKKPGSSVKVSCKASGGTFSSYGISWVRQAPGQGLEWMGWINPNSGGTKYAQKFQGRVTITADESTSTAYMELSSLRSEDTAVYYCARGEAGNLDWYFDLWGRGTLVTVSS

SEQ ID NO: 9528 - protein, 117 aa, synthetic construct
QVQLVQSGAEVKKPGASVKVSCKASGGTFSNYGISWVRQAPGQGLEWMGWINPNNGDTKYAQKFQGRVTMTRDTSTSTVYMELSSLRSEDTAVYYCAREDVWYFDLWGRGTLVTVSS

SEQ ID NO: 9529 - protein, 119 aa, synthetic construct
QVQLVQSGAEVKKPGASVKVSCKASGYTFTTYGISWVRQAPGQGLEWMGWISTYDGKTNYAQKLQGRVTMTRDTSTSTVYMELSSLRSEDTAVYYCALHLGGDWYFDLWGRGTLVTVSS

SEQ ID NO: 9530 - protein, 120 aa, synthetic construct
QVQLVQSGAEVKKPGASVKVSCKASGYTFTGYYMHWVRQAPGQGLEWMGWINPNTGATYYAQKFQGRVTMTRDTSTSTVYMELSSLRSEDTAVYYCARQHGDYDWYFDLWGRGTLVTVSS

SEQ ID NO: 9531 - protein, 114 aa, synthetic construct
QVQLVQSGAEVKKPGASVKVSCKASGDTFTTYYVHWVRQAPGQGLEWMGWINPNSGNTGYAQKFQGRVTMTRDTSTSTVYMELSSLRSEDTAVYYCARDSGRHWGQGTLVTVSS

SEQ ID NO: 9532 - protein, 120 aa, synthetic construct
QVQLVQSGAEVKKPGSSVKVSCKASGGTFSSYGISWVRQAPGQGLEWMGRIIPMLGIANYAQKFQGRVTITADESTSTAYMELSSLRSEDTAVYYCVREEVAGANWFDPWGQGTLVTVSS

SEQ ID NO: 9533 - protein, 120 aa, synthetic construct
QVQLVQSGAEVKKPGASVKVSCKASGYTFTSYAMNWVRQAPGQGLEWMGIINPSGGSTSYARKFQGRVTMTRDTSTSTVYMELSSLRSEDTAVYYCAREGDYGSGEFDYWGQGTLVTVSS

SEQ ID NO: 9534 - protein, 122 aa, synthetic construct
QVQLVQSGAEVKKPGASVKVSCKASGYTFTSSYMHWVRQAPGQGLEWMGWMNPRSGNTGYAQKFQGRVTMTRDTSTSTVYMELSSLRSEDTAVYYCARERDDYGDYGWLDYWGQGTLVTVSS

SEQ ID NO: 9535 - protein, 126 aa, synthetic construct
QVQLVQSGAEVKKPGASVKVSCKASGYTFTGYYMHWVRQAPGQGLEWMGIINPSGGSTSYAQKFQGRVTMTRDTSTSTVYMELSSLRSEDTAVYYCARDLYDSSGYWHYYYYMDVWGKGTTVTVSS

SEQ ID NO: 9536 - protein, 118 aa, synthetic construct
QVQLVQSGAEVKKPGSSVKVSCKASGGTFSSYAFSWVRQAPGQGLEWMGWINPNSGGTNYAQKFQGRVTITADESTSTAYMELSSLRSEDTAVYYCARFSGYDYVDYWGQGTLVTVSS

SEQ ID NO: 9537 - protein, 117 aa, synthetic construct
QVQLVQSGAEVKKPGASVKVSCKASGGTFSSYAISWVRQAPGQGLEWMGIINPNGGNTSYAQKFQGRVTMTRDTSTSTVYMELSSLRSEDTAVYYCARDVGEDFDLWGQGTMVTVSS

SEQ ID NO: 9538 - protein, 119 aa, synthetic construct
QVQLVQSGAEVKKPGSSVKVSCKASGYTFTSYYIHWVRQAPGQGLEWLGVINPADGDTTYAQMFQGRVTITADESTSTAYMELSSLRSEDTAVYYCARDFDWLFAMDVWGKGTTVTVSS

SEQ ID NO: 9539 - protein, 117 aa, synthetic construct
QVQLVQSGAEVKKPGASVKVSCKASGGTFSNYALNWVRQAPGQGLEWMGRINPNGGTTYYAKNFQGRVTMTRDTSTSTVYMELSSLRSEDTAVYYCAKHGDHGFYVWGLWTKGTVSS

SEQ ID NO: 9540 - protein, 119 aa, synthetic construct
QVQLVQSGAEVKKPGASVKVSCKASGGTFSSYAISWVRQAPGQGLEWMGMINPNVGSATYAQRFQGRVTMTRDTSTSTVYMELSSLRSEDTAVYYCAREDSGTSWFDPWGQGTLVTVSS

SEQ ID NO: 9541 - protein, 122 aa, synthetic construct
QVQLVQSGAEVKKPGASVKVSCKASGYTFTSYYMHWVRQAPGQGLEWMGIINPSDGSTSYAQRFQGRVTMTRDTSTSTVYMELSSLRSEDTAVYYCARDDRGSNYYYGMDVWGQGTTVTVSS

SEQ ID NO: 9542 - protein, 125 aa, synthetic construct
QVQLVQSGAEVKKPGASVKVSCKASGYTFTAYYVHWVRQAPGQGLEWMGWMNPNSGTTGYAQKFQGRVTMTRDTSTSTVYMELSSLRSEDTAVYYCARDSSDYYGDYRADAFDIWGQGTMVTVSS

SEQ ID NO: 9543 - protein, 113 aa, synthetic construct
QVQLVQSGAEVKKPGSSVKVSCKASGYTFTSYDINWVRQAPGQGLEWMGVISPSGDATLYAQSFQGRVTITADESTSTAYMELSSLRSEDTAVYYCVKGLDHWGQGTLVTVSS

SEQ ID NO: 9544 - protein, 125 aa, synthetic construct
EVQLLESGGGLVQPGGSLRLSCAASGFSFSDYGMHWVRQAPGKGLEWVSAIGGIGDSTYYADSVKGRFTISRDNSKNTLYLQMNSLRAEDTAVYYCARMNYGDSNYYYYYGMDVWGQGTTVTVSS

SEQ ID NO: 9545 - protein, 116 aa, synthetic construct
QVQLVQSGAEVKKPGASVKVSCKASGYTFTSYDISWVRQAPGQGLEWMGMISPSDGSTTYAPKFQGRVTMTRDTSTSTVYMELSSLRSEDTAVYYCARGAVGFDYWGQGTLVTVSS

SEQ ID NO: 9546 - protein, 117 aa, synthetic construct
QVQLVQSGAEVKKPGSSVKVSCKASGYTFTSYGISWVRQAPGQGLEWMGWINTYSGYTDYAHKFQGRVTITADESTSTAYMELSSLRSEDTAVYYCTTDDFLSFGYWGQGTLVTVSS

SEQ ID NO: 9547 - protein, 122 aa, synthetic construct
QVQLVQSGAEVKKPGSSVKVSCKASGYMFTDYYIHWVRQAPGQGLEWMGGIIPYFGTANYAQKFQGRVTITADESTSTAYMELSSLRSEDTAVYYCARSISGSYVLDAFDIWGQGTTVTVSS

SEQ ID NO: 9548 - protein, 123 aa, synthetic construct
QVQLVQSGAEVKKPGSSVKVSCKASGYTFNSYGISWVRQAPGQGLEWMGGIIPIFGTANYAQKFQGRVTITADESTSTAYMELSSLRSEDTAVYYCARDWGYGDYADDAFDIWGQGTMVTVSS

SEQ ID NO: 9549 - protein, 116 aa, synthetic construct
QVQLVQSGAEVKKPGSSVKVSCKASGGTFSNNDINWVRQAPGQGLEWMGWINPIYGSANYAQNFQGRVTITADESTSTAYMELSSLRSEDTAVYYCAADWRGFDYWGQGTLVTVSS

SEQ ID NO: 9550 - protein, 120 aa, synthetic construct
QVQLVQSGAEVKKPGASVKVSCKASGYTFTEYAIHWVRQAPGQGLEWMGRMNPHNGDTGYAQKFQGRVTMTRDTSTSTVYMELSSLRSEDTAVYYCAREGDYLGYPIDCWGRGTLVTVSS

SEQ ID NO: 9551 - protein, 117 aa, synthetic construct
EVQLLESGGGLVQPGGSLRLSCAASGFTFSDYSMSWVRQAPGKGLEWVAAIWQDGNVKFYADSVKGRFTISRDNSKNTLYLQMNSLRAEDTAVYYCARDGNSGYVFWGQGTLVTVSS

SEQ ID NO: 9552 - protein, 122 aa, synthetic construct
QVQLVQSGAEVKKPGASVKVSCKASGYTFTTYYMHWVRQAPGQGLEWMGWINPNTGDTAYAQKIQGRVTMTRDTSTSTVYMELSSLRSEDTAVYYCARTAEAVAGLPAFDYWGQGTLVTVSS

SEQ ID NO: 9553 - protein, 118 aa, synthetic construct
QVQLVQSGAEVKKPGSSVKVSCKASGGTSNNYAIDWVRQAPGQGLEWMGGIIPLFGTTTYAQKFQGRVTITADESTSTAYMELSSLRSEDTAVYYCARVTLYGDYDYWGQGTLVTVSS

SEQ ID NO: 9554 - protein, 118 aa, synthetic construct
QVQLVQSGAEVKKPGASVKVSCKASGYSLITHWMHWVRQAPGQGLEWMGMINPSDGVTYYAQTFQGRVTMTRDTSTSTVYMELSSLRSEDTAVYYCAREYYGEGFDYWGQGTLVTVSS

SEQ ID NO: 9555 - protein, 118 aa, synthetic construct
QVQLVQSGAEVKKPGASVKVSCKASGGTFSSYAISWVRQAPGQGLEWMGIINPSGGSTSNAQKFQGRVTMTRDTSTSTVYMELSSLRSEDTAVYYCARDLGDTAMDGWGQGTLVTVSS

SEQ ID NO: 9556 - protein, 118 aa, synthetic construct
QVQLVQSGAEVKKPGASVKVSCKASGYTFTSYYLHWVRQAPGQGLEWMGIITPSGGSTTYAHKFQGRVTMTRDTSTSTVYMELSSLRSEDTAVYYCARDGGLASFDYWGQGTLVTVSS

SEQ ID NO: 9557 - protein, 121 aa, synthetic construct
QVQLVQSGAEVKKPGASVKVSCKASGGTFSSYAISWVRQAPGQGLEWMGWMNPNSGNTGYAQKFQGRVTMTRDTSTSTVYMELSSLRSEDTAVYYCARGGGWAMTDAFDIWGQGTMVTVSS

SEQ ID NO: 9558 - protein, 124 aa, synthetic construct
EVQLVESGGGLVKPGGSLRLSCAASGFTFDDYGMSWVRQAPGKGLEWVSLIYSGGDTYYADSVKGRFTISRDDSKNTLYLQMNSLKTEDTAVYYCTRKEYYYDSSGYLRLFDYWGQGTLVTVSS

SEQ ID NO: 9559 - protein, 123 aa, synthetic construct
QVQLVQSGAEVKKPGSSVKVSCKASGYTFTDYYMHWVRQAPGQGLEWMGGINPIFGTSNYAQKFQGRVTITADESTSTAYMELSSLRSEDTAVYYCARDISGYDYYYYGMDVWGQGTTVTVSS

SEQ ID NO: 9560 - protein, 124 aa, synthetic construct
QVQLVQSGAEVKKPGASVKVSCKASGGTLNNYAFSWVRQAPGQGLEWMGMIDPSDGTIAYAQKFQGRVTMTRDTSTSTVYMELSSLRSEDTAVYYCARSDYDFWSGLGGYFDYWGQGTLVTVSS

SEQ ID NO: 9561 - protein, 122 aa, synthetic construct
QVQLVQSGAEVKKPGASVKVSCKASGGTFSSYAISWVRQAPGQGLEWMGTIDPNSGGTMFAQKFQGRVTMTRDTSTSTVYMELSSLRSEDTAVYYCARDSAEWELGGSFDYWGQGTLVTVSS

SEQ ID NO: 9562 - protein, 123 aa, synthetic construct
EVQLLESGGGLVQPGGSLRLSCAASGFTFSNHYTSWVRQAPGKGLEWVSSIGVNGDTYYLDSVKGRFTISRDNSKNTLYLQMNSLRAEDTAVYYCAREGLVFSGRGHWYFDLWGRGTLVTVSS

SEQ ID NO: 9563 - protein, 118 aa, synthetic construct
QVQLVQSGAEVKKPGASVKVSCKASGGTFSNYAISWVRQAPGQGLEWMGRINPNGGNTSNAQKFQGRVTMTRDTSTSTVYMELSSLRSEDTAVYYCARDYEDADFDGWGQGTLVTVSS

SEQ ID NO: 9564 - protein, 117 aa, synthetic construct
QVQLVQSGAEVKKPGASVKVSCKASGYTFSDHHVHWVRQAPGQGLEWMGWMNPDSGNTGYAQRFQGRVTMTRDTSTSTVYMELSSLRSEDTAVYYCARDSTSGVDYWGQGTLVTVSS

SEQ ID NO: 9565 - protein, 125 aa, synthetic construct
EVQLLESGGGLVQPGGSLRLSCAASGFTFSSYAMSWVRQAPGKGLEWVAVISYDGHDQFYADSVKGRFTISRDNSKNTLYLQMNSLRAEDTAVYYCARGEQQLEGFYYYYGMDVWGQGTTVTVSS

SEQ ID NO: 9566 - protein, 119 aa, synthetic construct
EVQLLESGGGLVQPGGSLRLSCAASGFTFSSYWMHWVRQAPGKGLEWVAVISYDGSKEYYADSVKGRFTISRDNSKNTLYLQMNSLRAEDTAVYYCASDYGDYGTYDYWGQGTLVTVSS

SEQ ID NO: 9567 - protein, 125 aa, synthetic construct
EVQLLESGGGLVQPGGSLRLSCAASGFTFSSYWMHWVRQAPGKGLEWVSGISGGGDDTYYADSVKGRFTISRDNSKNTLYLQMNSLRAEDTAVYYCAREPLAYCGGDCPGGFDYWGQGTLVTVSS

SEQ ID NO: 9568 - protein, 118 aa, synthetic construct
EVQLLESGGGLVQPGGSLRLSCAASGFTFSDHYMDWVRQAPGKGLEWVSAIGTGGDTYYADSVKGRFTISRDNSKNTLYLQMNSLRAEDTAVYYCARHEDTAIFLDYWGQGTLVTVSS

SEQ ID NO: 9569 - protein, 121 aa, synthetic construct
QVQLVQSGAEVKKPGASVKVSCKASGYTFTSYYMHWVRQAPGQGLEWMGMISPSDGSTTYAPKFQGRVTMTRDTSTSTVYMELSSLRSEDTAVYYCARDGYDAWSYGMDVWGQGTMVTVSS

SEQ ID NO: 9570 - protein, 117 aa, synthetic construct
QVQLVQSGAEVKKPGSSVKVSCKASGYTFTGYYMHWVRQAPGQGLEWMGWMNPNSGNTGYAQKFQGRVTITADESTSTAYMELSSLRSEDTAVYYCARDGVTGTDYWGQGTLVTVSS

SEQ ID NO: 9571 - protein, 122 aa, synthetic construct
EVQLLESGGGLVQPGGSLRLSCAASGFAFSSYVLHWVRQAPGKGLEWVSAISGAGDSTYYADSVKGRFTISRDNSKNTLYLQMNSLRAEDTAVYYCAREPTTVTDDWYFDLWGRGTLVTVSS

SEQ ID NO: 9572 - protein, 118 aa, synthetic construct
EVQLVESGGGLVKPGGSLRLSCAASGFAFSSHWMHWVRQAPGKGLEWVSAISGNGDNSYYADSVKGRFTISRDDSKNTLYLQMNSLKTEDTAVYYCARDRAPEYFDLWGRGTLVTVSS

SEQ ID NO: 9573 - protein, 121 aa, synthetic construct
QVQLVQSGAEVKKPGASVKVSCKASGGTFSSYAISWVRQAPGQGLEWMGWINPNSGGTNYAQKFQGRVTMTRDTSTSTVYMELSSLRSEDTAVYYCARDDYGDYGGGMDVWGQGTTVTVSS

SEQ ID NO: 9574 - protein, 122 aa, synthetic construct
QVQLVQSGAEVKKPGASVKVSCKASGYTFTDYYMHWVRQAPGQGLEWMGWMNPNSGHTGYAEKFQGRVTMTRDTSTSTVYMELSSLRSEDTAVYYCAKDTSPRYGDGFFDYWGQGTLVTVSS

SEQ ID NO: 9575 - protein, 120 aa, synthetic construct
EVQLLESGGGLVQPGGSLRLSCAASGFTFSSYWMHWVRQAPGKGLEWVAVTSYDGSNKYYADSVKGRFTISRDNSKNTLYLQMNSLRAEDTAVYYCARESGFSAEYFQHWGQGTLVTVSS

SEQ ID NO: 9576 - protein, 122 aa, synthetic construct
QVQLVQSGAEVKKPGASVKVSCKASGGTFSSYAISWVRQAPGQGLEWMGIINPSGGSTSYAQKFQGRVTMTRDTSTSTVYMELSSLRSEDTAVYYCARATGLYCSGSCFDYWGQGTLVTVSS

SEQ ID NO: 9577 - protein, 114 aa, synthetic construct
DIVMTQSPDSLAVSLGERATINCKSSQSVLSSSYNKNYLAWYQQKPGQPPKLLIYWASTRESGVPDRFSGSGSGTDFTLTISSLQAEDVAVYYCQQYYSTPWTFGCGTKVEIKR

SEQ ID NO: 9578 - protein, 108 aa, synthetic construct
DIQMTQSPSSLSASVGDRVTITCRASQDIGDYLAWYQQKPGKAPKLLIYDASSLQSGVPSRFSGSGSGTDFTLTISSLQPEDFATYYCQQANSFPLTFGCGTKVEIKR

SEQ ID NO: 9579 - protein, 108 aa, synthetic construct
DIQMTQSPSSLSASVGDRVTITCRASQGISNYLAWYQQKPGKAPKLLIYSASNLQSGVPSRFSGSGSGTDFTLTISSLQPEDFATYYCQQSYSTPLTFGCGTKVEIKR

SEQ ID NO: 9580 - protein, 108 aa, synthetic construct
DIQMTQSPSSLSASVGDRVTITCRASQGIASYLAWYQQKPGKAPKLLIYAASTLQPGVPSRFSGSGSGTDFTLTISSLQPEDFATYYCQQFDSYPITFGQGTKVEIKR

SEQ ID NO: 9581 - protein, 108 aa, synthetic construct
DIQMTQSPSSLSASVGDRVTITCRASQSISSWLAWYQQKPGKAPKLLIYAASTLQSGVPSRFSGSGSGTDFTLTISSLQPEDFATYYCQQGYSTPYIFGQGTKVEIKR

SEQ ID NO: 9582 - protein, 108 aa, synthetic construct
DIQMTQSPSSLSASVGDRVTITCRASQGISNYLAWYQQKPGKAPKLLIYKASSLESGVPSRFSGSGSGTDFTLTISSLQPEDFATYYCQQSYNTPFTFGQGTRLEIKR

SEQ ID NO: 9583 - protein, 108 aa, synthetic construct
DIQMTQSPSSLSASVGDRVTITCRASQDISNYLNWYQQKPGKAPKLLIYDASNLETGVPSRFSGSGSGTDFTLTISSLQPEDFATYYCQQSYSTPLTFGQGTKVEIKR

SEQ ID NO: 9584 - protein, 114 aa, synthetic construct
DIVMTQSPDSLAVSLGERATINCKSSQSVLSSSYNKNYLAWYQQKPGQPPKLLIYWASTRESGVPDRFSGSGSGTDFTLTISSLQAEDVAVYYCQQYYSTPWTFGQGTKVEIKR

SEQ ID NO: 9585 - protein, 107 aa, synthetic construct
DIQMTQSPSSLSASVGDRVTITCRASQDISNYLNWYQQKPGKAPKLLIYDASNLETGVPSRFSGSGSGTDFTLTISSLQPEDFATYYCQQSYSTPLTFGQGTKVEIK

SEQ ID NO: 9586 - protein, 107 aa, synthetic construct [sequence omitted]

SEQ ID NO: 9587 - protein, 107 aa, synthetic construct
DIQMTQSPSSLSASVGDRVTITCQASQDISNYLNWYQQKPGKAPKLLIYKASSLETGVPSRFSGSGSGTDFTLTISSLQPEDFATYYCQQSFSSPLTFGQGTKVEIK

SEQ ID NO: 9588 - protein, 107 aa, synthetic construct
DIQMTQSPSSLSASVGDRVTITCRASQNVNTWLAWYQQKPGKAPKLLIYEASSLQSGVPSRFSGSGSGTDFTLTISSLQPEDFATYYCQQANSFPFTFGQGTKLEIK

SEQ ID NO: 9589 - protein, 107 aa, synthetic construct
DIQMTQSPSSLSASVGDRVTITCRASQSISDWLAWYQQKPGKAPKLLIYAASSLQSGVPSRFSGSGSGTDFTLTISSLQPEDFATYYCAQHNHYPYTFGQGTRLEIK

SEQ ID NO: 9590 - protein, 113 aa, synthetic construct
DIVMTQSPDSLAVSLGERATINCKSSQSVLSSSYNKNYLAWYQQKPGQPPKLLIYWASTRESGVPDRFSGSGSGTDFTLTISSLQAEDVAVYYCQQYYTTPFTFGQGTKVEIK

SEQ ID NO: 9591 - protein, 113 aa, synthetic construct
DIVMTQSPDSLAVSLGERATINCKSSQSVLSSSYNKNYLAWYQQKPGQPPKLLIYWASTRASGVPDRFSGSGSGTDFTLTISSLQAEDVAVYYCQQYYSTPFTFGQGTKLEIK

SEQ ID NO: 9592 - protein, 107 aa, synthetic construct
DIQMTQSPSSLSASVGDRVTITCRASQAIRDDLGWYQQKPGKAPKLLIYDASHLEAGVPSRFSGSGSGTDFTLTISSLQPEDFATYYCQQANSFPITFGQGTRLEIK

SEQ ID NO: 9593 - protein, 107 aa, synthetic construct
DIQMTQSPSSLSASVGDRVTITCRASQGVGNDLAWYQQKPGKAPKLLIYAASTLQTGVPSRFSGSGSGTDFTLTISSLQPEDFATYYCQQASSFPLTFGPGTKVDIK

SEQ ID NO: 9594 - protein, 107 aa, synthetic construct
DIQMTQSPSSLSASVGDRVTITCRASQIIGTNLAWYQQKPGKAPKLLIYAASSLQSGVPSRFSGSGSGTDFTLTISSLQPEDFATYYCQQSYTFPVTFGQGTKLEIK

SEQ ID NO: 9595 - protein, 107 aa, synthetic construct
DIQMTQSPSSLSASVGDRVTITCRASQSISTWLAWYQQKPGKAPKLLIYDASSLESGVPSRFSGSGSGTDFTLTISSLQPEDFATYYCQQSYSTPFTFGPGTKVDIK

SEQ ID NO: 9596 - protein, 113 aa, synthetic construct
DIVMTQSPDSLAVSLGERATINCKSSQSVLSSSNNKNYLAWYQQKPGQPPKLLIYWASTRESGVPDRFSGSGSGTDFTLTISSLQAEDVAVYYCQQYYGSPLTFGPGTKVDIK

SEQ ID NO: 9597 - protein, 113 aa, synthetic construct
DIVMTQSPDSLAVSLGERATINCKSSQSVLSSSYNKNYLAWYQQKPGQPPKLLIYWASTRESGVPDRFSGSGSGTDFTLTISSLQAEDVAVYYCQQYYSSPPTFGQGTRLEIK

SEQ ID NO: 9598 - protein, 113 aa, synthetic construct
DIVMTQSPDSLAVSLGERATINCKSSQSVLSSSYNKNYLAWYQQKPGQPPKLLIYWASTRESGVPDRFSGSGSGTDFTLTISSLQAEDVAVYYCQQYYSSPPTFGGGTKVEIK

SEQ ID NO: 9599 - protein, 113 aa, synthetic construct
DIVMTQSPDSLAVSLGERATINCKSSQSVLSSSYNKNYLAWYQQKPGQPPKLLIYWASTRESGVPDRFSGSGSGTDFTLTISSLQAEDVAVYYCQQYYSTPWTFGQGTKVEIK

SEQ ID NO: 9600 - protein, 113 aa, synthetic construct
DIVMTQSPDSLAVSLGERATINCKSSQSVLSSSYNKNYLAWYQQKPGQPPKLLIYWASTRASGVPDRFSGSGSGTDFTLTISSLQAEDVAVYYCQQYYGSPPTFGQGTRLEIK

SEQ ID NO: 9601 - protein, 107 aa, synthetic construct
DIQMTQSPSSLSASVGDRVTITCQASQDIRNYLNWYQQKPGKAPKLLIYDASTLQSGVPSRFSGSGSGTDFTLTISSLQPEDFATYYCQQAYSFPWTFGQGTKLEIK

SEQ ID NO: 9602 - protein, 107 aa, synthetic construct
DIQMTQSPSSLSASVGDRVTITCQASQDISNYLNWYQQKPGKAPKLLIYNASNLETGVPSRFSGSGSGTDFTLTISSLQPEDFATYYCQQLNSYPFTFGGGTKVEIK

SEQ ID NO: 9603 - protein, 107 aa, synthetic construct
DIQMTQSPSSLSASVGDRVTITCQASQSISTWLAWYQQKPGKAPKLLIYAASTLRSGVPSRFSGSGSGTDFTLTISSLQPEDFATYYCLQHYTYPLTFGQGTRLEIK

SEQ ID NO: 9604 - protein, 107 aa, synthetic construct
DIQMTQSPSSLSASVGDRVTITCRASEDISTYLAWYQQKPGKAPKLLIYAASTLQSGVPSRFSGSGSGTDFTLTISSLQPEDFATYYCQQSHTIPWTFGQGTRLEIK

SEQ ID NO: 9605 - protein, 107 aa, synthetic construct
DIQMTQSPSSLSASVGDRVTITCRASHHISDFLNWYQQKPGKAPKLLIYAASTLQSGVPSRFSGSGSGTDFTLTISSLQPEDFATYYCQQSYSSPYTFGQGTKLEIK

SEQ ID NO: 9606 - protein, 107 aa, synthetic construct
DIQMTQSPSSLSASVGDRVTITCRASQDIGDYLAWYQQKPGKAPKLLIYDASSLQSGVPSRFSGSGSGTDFTLTISSLQPEDFATYYCQQANSFPLTFGGGTKVEIK

SEQ ID NO: 9607 - protein, 107 aa, synthetic construct
DIQMTQSPSSLSASVGDRVTITCRASQDIRSYLAWYQQKPGKAPKLLIYAASSLQSGVPSRFSGSGSGTDFTLTISSLQPEDFATYYCQQSYTAPPTFGQGTRLEIK

SEQ ID NO: 9608 - protein, 107 aa, synthetic construct
DIQMTQSPSSLSASVGDRVTITCRASQDISNNLNWYQQKPGKAPKLLIYAASTLQSGVPSRFSGSGSGTDFTLTISSLQPEDFATYYCLQHNTYPLTFGQGTKLEIK

SEQ ID NO: 9609 - protein, 107 aa, synthetic construct
DIQMTQSPSSLSASVGDRVTITCRASQDISNWLAWYQQKPGKAPKLLIYDASSLQSGVPSRFSGSGSGTDFTLTISSLQPEDFATYYCQQAISFPLTFGGGTKVEIK

SEQ ID NO: 9610 - protein, 107 aa, synthetic construct
DIQMTQSPSSLSASVGDRVTITCRASQGIANYLAWYQQKPGKAPKLLIYAASSLQSGVPSRFSGSGSGTDFTLTISSLQPEDFATYYCQQADSFPLTFGQGTKVEIK

SEQ ID NO: 9611 - protein, 107 aa, synthetic construct
DIQMTQSPSSLSASVGDRVTITCRASQGIASYLAWYQQKPGKAPKLLIYAASTLQPGVPSRFSGSGSGTDFTLTISSLQPEDFATYYCQQFDSYPITFGQGTKVEIK

SEQ ID NO: 9612 - protein, 107 aa, synthetic construct
DIQMTQSPSSLSASVGDRVTITCRASQGISNYLAWYQQKPGKAPKLLIYAASRLQSGVPSRFSGSGSGTDFTLTISSLQPEDFATYYCQQSSIIPFTFGQGTKLEIK

SEQ ID NO: 9613 - protein, 107 aa, synthetic construct
DIQMTQSPSSLSASVGDRVTITCRASQGISNYLAWYQQKPGKAPKLLIYAASTLQSGVPSRFSGSGSGTDFTLTISSLQPEDFATYYCQQAYSFPYTFGQGTKLEIK

SEQ ID NO: 9614 - protein, 107 aa, synthetic construct
DIQMTQSPSSLSASVGDRVTITCRASQSIGRWLAWYQQKPGKAPKLLIYDASNLETGVPSRFSGSGSGTDFTLTISSLQPEDFATYYCQQSYSTPRTFGQGTKVEIK

SEQ ID NO: 9615 - protein, 107 aa, synthetic construct
DIQMTQSPSSLSASVGDRVTITCRASQSINSWLAWYQQKPGKAPKLLIYDTSSLQSGVPSRFSGSGSGTDFTLTISSLQPEDFATYYCQQTYSTPYTFGQGTKLEIK

SEQ ID NO: 9616 - protein, 107 aa, synthetic construct
DIQMTQSPSSLSASVGDRVTITCRASQSISSWLAWYQQKPGKAPKLLIYAASTLQSGVPSRFSGSGSGTDFTLTISSLQPEDFATYYCQQGYSTPYIFGQGTKVEIK

SEQ ID NO: 9617 - protein, 107 aa, synthetic construct
DIQMTQSPSSLSASVGDRVTITCRASQSISSYLNWYQQKPGKAPKLLIYAASSLQSGVPSRFSGSGSGTDFTLTISSLQPEDFATYYCQQTDSIPITFGQGTRLEIK

SEQ ID NO: 9618 - protein, 107 aa, synthetic construct
DIQMTQSPSSLSASVGDRVTITCRASQSISSYLNWYQQKPGKAPKLLIYAASTLQSGVPSRFSGSGSGTDFTLTISSLQPEDFATYYCQQSYSIPYTFGQGTKVEIK

SEQ ID NO: 9619 - protein, 107 aa, synthetic construct
DIQMTQSPSSLSASVGDRVTITCRASQTIRSYLNWYQQKPGKAPKLLIYKASSLESGVPSRFSGSGSGTDFTLTISSLQPEDFATYYCQQTYTIPITFGPGTKVDIK

SEQ ID NO: 9620 - protein, 107 aa, synthetic construct
DIQMTQSPSSLSASVGDRVTITCRASQTISNWLAWYQQKPGKAPKLLIYAASTLQSGVPSRFSGSGSGTDFTLTISSLQPEDFATYYCQQANSFPPTFGQGTKVEIK

SEQ ID NO: 9621 - protein, 107 aa, synthetic construct
DIQMTQSPSSLSASVGDRVTITCRASQYIGSYLNWYQQKPGKAPKLLIYDASNLETGVPSRFSGSGSGTDFTLTISSLQPEDFATYYCQQVDSYPLTFGGGTKVEIK

SEQ ID NO: 9622 - protein, 112 aa, synthetic construct
DIVMTQSPLSLPVTPGEPASISCRSSQSLLHSNGYNYLDWYLQKPGQSPQLLIYLGSNRASGVPDRFSGSGSGTDFTLKISRVEAEDVGVYYCMQGTHWPPTFGQGTKLEIK

SEQ ID NO: 9623 - protein, 112 aa, synthetic construct
DIVMTQSPLSLPVTPGEPASISCRSSQSLLHSNGYNYLDWYLQKPGQSPQLLIYFGSNRASGVPDRFSGSGSGTDFTLKISRVEAEDVGVYYCMQALQAPVSFGQGTRLEIK

SEQ ID NO: 9624 - protein, 113 aa, synthetic construct
DIVMTQSPDSLAVSLGERATINCKSSQSVLSSSYNKNYLAWYQQKPGQPPKLLIYWASSRQSGVPDRFSGSGSGTDFTLTISSLQAEDVAVYYCQQYYSTPLTFGQGTKVEIK

SEQ ID NO: 9625 - protein, 113 aa, synthetic construct
DIVMTQSPDSLAVSLGERATINCKSSQSVSSSSYNKNYLAWYQQKPGQPPKLLIYWASVRESGVPDRFSGSGSGTDFTLTISSLQAEDVAVYYCQQYYSTPITFGQGTRLEIK

SEQ ID NO: 9626 - protein, 113 aa, synthetic construct
DIVMTQSPDSLAVSLGERATINCKSTQNVLSSSNNNSYLAWYQQKPGQPPKLLIYWASTRESGVPDRFSGSGSGTDFTLTISSLQAEDVAVYYCQQYYSTPFTFGQGTRLEIK

SEQ ID NO: 9627 - protein, 107 aa, synthetic construct
DIQMTQSPSSLSASVGDRVTITCQASQDIGNYLNWYQQKPGKAPKLLIYAASSLQSGVPSRFSGSGSGTDFTLTISSLQPEDFATYYCQQTYNTPLTFGGGTKLEIK

SEQ ID NO: 9628 - protein, 107 aa, synthetic construct
DIQMTQSPSSLSASVGDRVTITCQASQDISNYLNWYQQKPGKAPKLLIYEASTLQSGVPSRFSGSGSGTDFTLTISSLQPEDFATYYCQQSYSTPFTFGPGTKVDIK

SEQ ID NO: 9629 - protein, 107 aa, synthetic construct
DIQMTQSPSSLSASVGDRVTITCQASQDISTWLAWYQQKPGKAPKLLIYRASTLESGVPSRFSGSGSGTDFTLTISSLQPEDFATYYCQQSYSIPLTFGGGTKVEIK

SEQ ID NO: 9630 - protein, 107 aa, synthetic construct
DIQMTQSPSSLSASVGDRVTITCRASQNINNYLNWYQQKPGKAPKLLIYAASRLQSGVPSRFSGSGSGTDFTLTISSLQPEDFATYYCQQSYSAPVTFGQGTKLEIK

SEQ ID NO: 9631 - protein, 107 aa, synthetic construct
DIQMTQSPSSLSASVGDRVTITCRASQNINTWLAWYQQKPGKAPKLLIYAASSLQSGVPSRFSGSGSGTDFTLTISSLQPEDFATYYCQQAYSFPFTFGPGTKVDIK

SEQ ID NO: 9632 - protein, 107 aa, synthetic construct
DIQMTQSPSSLSASVGDRVTITCRASQRIGNYLNWYQQKPGKAPKLLIYAASSLQSGVPSRFSGSGSGTDFTLTISSLQPEDFATYYCQQSYSTPLTFGGGTKVEIK

SEQ ID NO: 9633 - protein, 106 aa, synthetic construct
DIQMTQSPSSLSASVGDRVTITCRASQSISTYLNWYQQKPGKAPKLLIYAASTLQSGVPSRFSGSGSGTDFTLTISSLQPEDFATYYCQQSYRTVTFGQGTRLEIK

SEQ ID NO: 9634 - protein, 107 aa, synthetic construct
EIVMTQSPATLSVSPGERATLSCRASQSVGSYLAWYQQKPGQAPRLLIYGASTRATGIPARFSGSGSGTEFTLTISSLQSEDFAVYYCQQYDSSSQTFGQGTKVEIK

SEQ ID NO: 9635 - protein, 107 aa, synthetic construct
EIVMTQSPATLSVSPGERATLSCRASRSVSTYLAWYQQKPGQAPRLLIYGASTRATGIPARFSGSGSGTEFTLTISSLQSEDFAVYYCQQYDGSPYTFGQGTKLEIK

SEQ ID NO: 9636 - protein, 112 aa, synthetic construct
DIVMTQSPLSLPVTPGEPASISCRSSQSLLHSNGYNYLDWYLQKPGQSPQLLIYDASNLETGVPDRFSGSGSGTDFTLKISRVEAEDVGVYYCMQALQTPPAFGPGTKVDIK

SEQ ID NO: 9637 - protein, 113 aa, synthetic construct
DIVMTQSPDSLAVSLGERATINCKSSQSVLSSSYNKNFLAWYQQKPGQPPKLLIYWASTRESGVPDRFSGSGSGTDFTLTISSLQAEDVAVYYCQQYYSAPPTFGQGTKVEIK

SEQ ID NO: 9638 - protein, 113 aa, synthetic construct
DIVMTQSPDSLAVSLGERATINCKSSQSVLSSSYNKNFLAWYQQKPGQPPKLLIYWASTRESGVPDRFSGSGSGTDFTLTISSLQAEDVAVYYCQQYYSDPITFGQGTKLEIK

SEQ ID NO: 9639 - protein, 113 aa, synthetic construct
DIVMTQSPDSLAVSLGERATINCKSSQSVLSSSYNKNYLAWYQQKPGQPPKLLIYWASARESGVPDRFSGSGSGTDFTLTISSLQAEDVAVYYCQQYYSIPIAFGQGTRLEIK

SEQ ID NO: 9640 - protein, 113 aa, synthetic construct
DIVMTQSPDSLAVSLGERATINCKSSQSVLSSSYNKNYLAWYQQKPGQPPKLLIYWASTRDSGVPDRFSGSGSGTDFTLTISSLQAEDVAVYYCQQYYSIPYTFGQGTKLEIK

SEQ ID NO: 9641 - protein, 113 aa, synthetic construct
DIVMTQSPDSLAVSLGERATINCKSSQSVLSTSYNKNYLAWYQQKPGQPPKLLIYWASTRASGVPDRFSGSGSGTDFTLTISSLQAEDVAVYYCQQYYTTPPTFGQGTKVEIK

SEQ ID NO: 9642 - protein, 113 aa, synthetic construct
DIVMTQSPDSLAVSLGERATINCKSSQSVLSTSYNRNFLAWYQQKPGQPPKLLIYWASTRQSGVPDRFSGSGSGTDFTLTISSLQAEDVAVYYCQQYYSTPYTFGQGTKLEIK

SEQ ID NO: 9643 - protein, 113 aa, synthetic construct
DIVMTQSPDSLAVSLGERATINCKSSQSVLYSSNNKNYLAWYQQKPGQPPKLLIYWASTRESGVPDRFSGSGSGTDFTLTISSLQAEDVAVYYCQQYYSTPLTFGGGTKVEIK

SEQ ID NO: 9644 - protein, 106 aa, synthetic construct
DIQMTQSPSSLSASVGDRVTITCQASQDISNYLNWYQQKPGKAPKLLIYAASSLQSGVPSRFSGSGSGTDFTLTISSLQPEDFATYYCQQSYSTPTFGQGTKVEIK

SEQ ID NO: 9645 - protein, 107 aa, synthetic construct
DIQMTQSPSSLSASVGDRVTITCQASQDISNYLNWYQQKPGKAPKLLIYGASTLQSGVPSRFSGSGSGTDFTLTISSLQPEDFATYYCQEADSFPLTFGGGTKVEIK

SEQ ID NO: 9646 - protein, 107 aa, synthetic construct
DIQMTQSPSSLSASVGDRVTITCRASQGIRNDLGWYQQKPGKAPKLLIYDASSLHSGVPSRFSGSGSGTDFTLTISSLQPEDFATYYCQQAYSFPWTFGQGTKLEIK

SEQ ID NO: 9647 - protein, 107 aa, synthetic construct
DIQMTQSPSSLSASVGDRVTITCRASQGISNYLAWYQQKPGKAPKLLIYKASSLESGVPSRFSGSGSGTDFTLTISSLQPEDFATYYCQQSYNTPFTFGQGTRLEIK

SEQ ID NO: 9648 - protein, 107 aa, synthetic construct
DIQMTQSPSSLSASVGDRVTITCRASQSINRWLAWYQQKPGKAPKLLIYSASNLQSGVPSRFSGSGSGTDFTLTISSLQPEDFATYYCQQSYNTPLTFGGGTKVEIK

SEQ ID NO: 9649 - protein, 107 aa, synthetic construct
DIQMTQSPSSLSASVGDRVTITCRASQSINTWLAWYQQKPGKAPKLLIYAASSLQSGVPSRFSGSGSGTDFTLTISSLQPEDFATYYCQQANSFPFTFGPGTKVDIK

SEQ ID NO: 9650 - protein, 107 aa, synthetic construct
DIQMTQSPSSLSASVGDRVTITCRASQSIRTWLAWYQQKPGKAPKLLIYDASSLETGVPSRFSGSGSGTDFTLTISSLQPEDFATYYCQQLNSYPLTFGGGTKVEIK

SEQ ID NO: 9651 - protein, 107 aa, synthetic construct
DIQMTQSPSSLSASVGDRVTITCRASQSIRTYLNWYQQKPGKAPKLLIYAASTLQSGVPSRFSGSGSGTDFTLTISSLQPEDFATYYCQQSYSAPLTFGGGTKLEIK

SEQ ID NO: 9652 - protein, 107 aa, synthetic construct
DIQMTQSPSSLSASVGDRVTITCRASQSISTYLNWYQQKPGKAPKLLIYAASSLHSGVPSRFSGSGSGTDFTLTISSLQPEDFATYYCQQSYSTPLTFGGGTKVEIK

SEQ ID NO: 9653 - protein, 107 aa, synthetic construct
DIQMTQSPSSLSASVGDRVTITCRASQSITTYLNWYQQKPGKAPKLLIYAASTLQSGVPSRFSGSGSGTDFTLTISSLQPEDFATYYCQQSYSTPLTFGGGTKVEIK

SEQ ID NO: 9654 - protein, 112 aa, synthetic construct
DIVMTQSPLSLPVTPGEPASISCRSSQSLLHSNGYNYLDWYLQKPGQSPQLLIYAASSLQSGVPDRFSGSGSGTDFTLKISRVEAEDVGVYYCMQARQTPLTFGQGTRLEIK

SEQ ID NO: 9655 - protein, 112 aa, synthetic construct
DIVMTQSPLSLPVTPGEPASISCRSSQSLLHSNGYNYLDWYLQKPGQSPQLLIYGASSLQSGVPDRFSGSGSGTDFTLKISRVEAEDVGVYYCMQTLQTPFTFGPGTKVDIK

SEQ ID NO: 9656 - protein, 112 aa, synthetic construct
DIVMTQSPLSLPVTPGEPASISCRSSQSLLHSNGYNYLDWYLQKPGQSPQLLIYLGSDRASGVPDRFSGSGSGTDFTLKISRVEAEDVGVYYCMQALQTPLTFGPGTKVDIK

SEQ ID NO: 9657 - protein, 113 aa, synthetic construct
DIVMTQSPDSLAVSLGERATINCKSSQTVFSTSYNKNYLAWYQQKPGQPPKLLIYWASTRESGVPDRFSGSGSGTDFTLTISSLQAEDVAVYYCQQYYSTPLTFGGGTKVEIK

SEQ ID NO: 9658 - protein, 113 aa, synthetic construct
DIVMTQSPDSLAVSLGERATINCKTSQSVFSTSYNRDYLAWYQQKPGQPPKLLIYWASTRESGVPDRFSGSGSGTDFTLTISSLQAEDVAVYYCQQYYSSPPTFGQGTKVEIK

SEQ ID NO: 9659 - protein, 107 aa, synthetic construct
DIQMTQSPSSLSASVGDRVTITCRASQSISSWLAWYQQKPGKAPKLLIYDASTLQSGVPSRFSGSGSGTDFTLTISSLQPEDFATYYCQQSYSTPFTFGPGTKVDIK

SEQ ID NO: 9660 - protein, 106 aa, synthetic construct
DIQMTQSPSSLSASVGDRVTITCRASQSISSYLNWYQQKPGKAPKLLIYDASNLKTGVPSRFSGSGSGTDFTLTISSLQPEDFATYYCQQSYSFPTFGGGTKVEIK

SEQ ID NO: 9661 - protein, 108 aa, synthetic construct
EIVMTQSPATLSVSPGERATLSCRASQSVSSYLAWYQQKPGQAPRLLIYDTSSRATGIPARFSGSGSGTEFTLTISSLQSEDFAVYYCQQYYDTPYTFGQGTKLEIKR

SEQ ID NO: 9662 - protein, 114 aa, synthetic construct
DIVMTQSPDSLAVSLGERATINCKSSQSVLYSSNNKNYLAWYQQKPGQPPKLLIYLASTREPGVPDRFSGSGSGTDFTLTISSLQAEDVAVYYCQQYYSTPPTFGGGTKLEIKR

SEQ ID NO: 9663 - protein, 114 aa, synthetic construct
DIVMTQSPDSLAVSLGERATINCKSSQSVLSSSYNKNYVAWYQQKPGQPPKLLIYWASTRESGVPDRFSGSGSGTDFTLTISSLQAEDVAVYYCQQYYSTPLTFGGGTKVEIKR

SEQ ID NO: 9664 - protein, 108 aa, synthetic construct
DIQMTQSPSSLSASVGDRVTITCQASQDISNYLNWYQQKPGKAPKLLIYAAASLQSGVPSRFSGSGSGTDFTLTISSLQPEDFATYYCQQTYSTPWTFGQGTRLEIKR

SEQ ID NO: 9665 - protein, 108 aa, synthetic construct
DIQMTQSPSSLSASVGDRVTITCRASQDINTYLAWYQQKPGKAPKLLIYAASSLQSGVPSRFSGSGSGTDFTLTISSLQPEDFATYYCQQSSSFPLTFGQGTKVEIKR

SEQ ID NO: 9666 - protein, 108 aa, synthetic construct
DIQMTQSPSSLSASVGDRVTITCQASQDISNYLNWYQQKPGKAPKLLIYAASSLQSGVPSRFSGSGSGTDFTLTISSLQPEDFATYYCQQLYNFPYTFGGGTKVEIKR

SEQ ID NO: 9667 - protein, 108 aa, synthetic construct
DIQMTQSPSSLSASVGDRVTITCRASQSISRYLAWYQQKPGKAPKLLIYGASTRESGVPSRFSGSGSGTDFTLTISSLQPEDFATYYCQQSYNTPLTFGQGTKLEIKR

SEQ ID NO: 9668 - protein, 108 aa, synthetic construct
DIQMTQSPSSLSASVGDRVTITCRASQTLSGWLAWYQQKPGKAPKLLIYGASTLQGGVPSRFSGSGSGTDFTLTISSLQPEDFATYYCQQYYSYPPTFGQGTKVEIKR

SEQ ID NO: 9669 - protein, 108 aa, synthetic construct
DIQMTQSPSSLSASVGDRVTITCFASQDIINYLNWYQQKPGKAPKLLIYEASNLETGVPSRFSGSGSGTDFTLTISSLQPEDFATYYCQQSYSTPLTFGQGTKVEIKR

SEQ ID NO: 9670 - protein, 108 aa, synthetic construct
DIQMTQSPSSLSASVGDRVTITCRASQSISSYLNWYQQKPGKAPKLLIYDVFNLGTGVPSRFSGSGSGTDFTLTISSLQPEDFATYYCQQSYSSPFTFGQGTRLEIKR

SEQ ID NO: 9671 - protein, 108 aa, synthetic construct
DIQMTQSPSSLSASVGDRVTITCQASQDISNYLNWYQQKPGKAPKLLIYMASNLESGVPSRFSGSGSGTDFTLTISSLQPEDFATYYCQQTNSFPLTFGQGTKLEIKR

SEQ ID NO: 9672 - protein, 108 aa, synthetic construct
DIQMTQSPSSLSASVGDRVTITCRASQSISSYLNWYQQKPGKAPKLLIYDASNLETGVPSRFSGSGSGTDFTLTISSLQPEDFATYYCQQSYSTPLTFGGGTKVEIKR

SEQ ID NO: 9673 - protein, 113 aa, synthetic construct
DIVMTQSPLSLPVTPGEPASISCRSSQSLLHSNGYNYLDWYLQKPGQSPQLLIYLGSNRASGVPDRFSGSGSGTDFTLKISRVEAEDVGVYYCMQALQSPWTFGQGTKLEIKR

SEQ ID NO: 9674 - protein, 114 aa, synthetic construct
DIVMTQSPDSLAVSLGERATINCKSSQSVLYSSNNKNYLAWYQQKPGQPPKLLIYWASTRESGVPDRFSGSGSGTDFTLTISSLQAEDVAVYYCQQYYSSPLTFGGGTKVEIKR

SEQ ID NO: 9675 - protein, 113 aa, synthetic construct
DIVMTQSPLSLPVTPGEPASISCRSSQSLLHSNGYNYLDWYLQKPGQSPQLLIYLGSNRASGVPDRFSGSGSGTDFTLKISRVEAEDVGVYYCMQALQTPPSFGQGTKVEIKR

SEQ ID NO: 9676 - protein, 108 aa, synthetic construct
DIQMTQSPSSLSASVGDRVTITCRASESVSTWLAWYQQKPGKAPKLLIYKASRLESGVPSRFSGSGSGTDFTLTISSLQPEDFATYYCQQSYKTPYTFGQGTKLEIKR

SEQ ID NO: 9677 - protein, 114 aa, synthetic construct
DIVMTQSPDSLAVSLGERATINCKSSQSVLYSSNNKNYLAWYQQKPGQPPKLLIYWASTRESGVPDRFSGSGSGTDFTLTISSLQAEDVAVYYCQQYFTTPLTFGQGTKLEIKR

SEQ ID NO: 9678 - protein, 108 aa, synthetic construct
DIQMTQSPSSLSASVGDRVTITCRASQSISSYLNWYQQKPGKAPKLLIYAASSLQSGVPSRFSGSGSGTDFTLTISSLQPEDFATYYCQQSYSTPYTFGQGTKVEIKR

SEQ ID NO: 9679 - protein, 114 aa, synthetic construct
DIVMTQSPDSLAVSLGERATINCKSSQSVLSSSYNKNYLAWYQQKPGQPPKLLIYWASTRASGVPDRFSGSGSGTDFTLTISSLQAEDVAVYYCQQYYDTPLTFGQGTKVEIKR

SEQ ID NO: 9680 - protein, 108 aa, synthetic construct
DIQMTQSPSSLSASVGDRVTITCRASQSISSYLNWYQQKPGKAPKLLIYKASTLESGVPSRFSGSGSGTDFTLTISSLQPEDFATYYCQQNDSIPITFGQGTRLEIKR

SEQ ID NO: 9681 - protein, 108 aa, synthetic construct
DIQMTQSPSSLSASVGDRVTITCRASQSISRWLAWYQQKPGKAPKLLIYDASNLETGVPSRFSGSGSGTDFTLTISSLQPEDFATYYCLQDYSYPLTFGQGTKVEIKR

SEQ ID NO: 9682 - protein, 113 aa, synthetic construct
DIVMTQSPDSLAVSLGERATINCKTSQSVFSTSYNRDYLAWYQQKPGQPPKLLIYWASTRAAGVPDRFSGSGSGTDFTLTISSLQAEDVAVYYCQQYYYTSTFGQGTKVEIKR

SEQ ID NO: 9683 - protein, 108 aa, synthetic construct
DIQMTQSPSSLSASVGDRVTITCRASQSINRYLNWYQQKPGKAPKLLIYAASSLQSGVPSRFSGSGSGTDFTLTISSLQPEDFATYYCQQANSFPPTFGGGTKVEIKR

SEQ ID NO: 9684 - protein, 108 aa, synthetic construct
DIQMTQSPSSLSASVGDRVTITCRASQGISNYLAWYQQKPGKAPKLLIYSASNLQSGVPSRFSGSGSGTDFTLTISSLQPEDFATYYCQQSYSTPLTFGGGTKVEIKR

SEQ ID NO: 9685 - protein, 108 aa, synthetic construct
DIQMTQSPSSLSASVGDRVTITCRASQSIDSYLNWYQQKPGKAPKLLIYKASTLESGVPSRFSGSGSGTDFTLTISSLQPEDFATYYCQQSYSAPLTFGGGTKVEIKR

SEQ ID NO: 9686 - protein, 108 aa, synthetic construct
DIQMTQSPSSLSASVGDRVTITCRASQDISTWLAWYQQKPGKAPKLLIYDASNLETGVPSRFSGSGSGTDFTLTISSLQPEDFATYYCQQVNSDPYTFGQGTRLEIKR

SEQ ID NO: 9687 - protein, 108 aa, synthetic construct
DIQMTQSPSSLSASVGDRVTITCQASQDISNYLNWYQQKPGKAPKLLIYAASTLESGVPSRFSGSGSGTDFTLTISSLQPEDFATYYCQQGDSLPLTFGGGTKVEIKR

SEQ ID NO: 9688 - protein, 108 aa, synthetic construct
DIQMTQSPSSLSASVGDRVTITCRASQGISNYLAWYQQKPGKAPKLLIYAASSLQSGVPSRFSGSGSGTDFTLTISSLQPEDFATYYCQQSDSFPYTFGQGTKVEIKR

SEQ ID NO: 9689 - protein, 108 aa, synthetic construct
EIVMTQSPATLSVSPGERATLSCRASQSVSTYLAWYQQKPGQAPRLLIYGASTRATGIPARFSGSGSGTEFTLTISSLQSEDFAVYYCQQHDSYPLTFGGGTKVEIKR

SEQ ID NO: 9690 - protein, 108 aa, synthetic construct
DIQMTQSPSSLSASVGDRVTITCRASQGIRNDLGWYQQKPGKAPKLLIYAASSLQSGVPSRFSGSGSGTDFTLTISSLQPEDFATYYCQQANSFPPTFGQGTRLEIKR

SEQ ID NO: 9691 - protein, 108 aa, synthetic construct
DIQMTQSPSSLSASVGDRVTITCRASESISTYLNWYQQKPGKAPKLLIYKASNLESGVPSRFSGSGSGTDFTLTISSLQPEDFATYYCQQTDSTFITFGQGTKVEIKR

SEQ ID NO: 9692 - protein, 108 aa, synthetic construct
DIQMTQSPSSLSASVGDRVTITCRASRNIHDYLNWYQQKPGKAPKLLIYAASTLQTGVPSRFSGSGSGTDFTLTISSLQPEDFATYYCQQTYSTPPTFGPGTKVDIKR

SEQ ID NO: 9693 - protein, 108 aa, synthetic construct
DIQMTQSPSSLSASVGDRVTITCRASQSNDSYLNWYQQKPGKAPKLLIYKASTLESGVPSRFSGSGSGTDFTLTISSLQPEDFATYYCQQSYSSPLTFGQGTKVEIKR

SEQ ID NO: 9694 - protein, 108 aa, synthetic construct
DIQMTQSPSSLSASVGDRVTITCRASQSISDFLNWYQQKPGKAPKLLIYAASTLQSGVPSRFSGSGSGTDFTLTISSLQPEDFATYYCQQSYSSPYTFGQGTKVEIKR

SEQ ID NO: 9695 - protein, 108 aa, synthetic construct
DIQMTQSPSSLSASVGDRVTITCQASQDISNYLNWYQQKPGKAPKLLIYAASSLQSGVPSRFSGSGSGTDFTLTISSLQPEDFATYYCQQANRFPLTFGQGTKLEIKR

SEQ ID NO: 9696 - protein, 108 aa, synthetic construct
DIQMTQSPSSLSASVGDRVTITCQASQDISNYLNWYQQKPGKAPKLLIYKASNLQSGVPSRFSGSGSGTDFTLTISSLQPEDFATYYCQQSYNFPATFGQGTRLEIKR

SEQ ID NO: 9697 - protein, 113 aa, synthetic construct
DIVMTQSPLSLPVTPGEPASISCRSSQSLLHSNGYNYLDWYLQKPGQSPQLLIYLGSNRASGVPDRFSGSGSGTDFTLKISRVEAEDVGVYYCMQGTHWPETFGQGTKVEIKR

SEQ ID NO: 9698 - protein, 108 aa, synthetic construct
DIQMTQSPSSLSASVGDRVTITCRASQSISSYLNWYQQKPGKAPKLLIYDASNLETGVPSRFSGSGSGTDFTLTISSLQPEDFATYYCQQSYSTPLTFGQGTKLEIKR

SEQ ID NO: 9699 - protein, 108 aa, synthetic construct
DIQMTQSPSSLSASVGDRVTITCRASQGISDYLAWYQQKPGKAPKLLIYDASNLETGVPSRFSGSGSGTDFTLTISSLQPEDFATYYCQQSYILPLTFGGGTKVEIKR

SEQ ID NO: 9700 - protein, 108 aa, synthetic construct
DIQMTQSPSSLSASVGDRVTITCRASQDINDFLAWYQQKPGKAPKLLIYAASSLQSGVPSRFSGSGSGTDFTLTISSLQPEDFATYYCQQSYSAPYTFGQGTKLEIKR

SEQ ID NO: 9701 - protein, 108 aa, synthetic construct
DIQMTQSPSSLSASVGDRVTITCRASQSISNWLAWYQQKPGKAPKLLIYAASKLESGVPSRFSGSGSGTDFTLTISSLQPEDFATYYCQQSYSSPWTFGQGTRLEIKR

SEQ ID NO: 9702 - protein, 108 aa, synthetic construct
DIQMTQSPSSLSASVGDRVTITCRASQGIDSWLAWYQQKPGKAPKLLIYAASTLESGVPSRFSGSGSGTDFTLTISSLQPEDFATYYCQQAYSFPLTFGGGTKVEIKR

SEQ ID NO: 9703 - protein, 108 aa, synthetic construct
DIQMTQSPSSLSASVGDRVTITCRASQNIGTWLAWYQQKPGKAPKLLIYRASSLESGVPSRFSGSGSGTDFTLTISSLQPEDFATYYCQQAYSFPWTFGQGTKLEIKR

SEQ ID NO: 9704 - protein, 108 aa, synthetic construct
DIQMTQSPSSLSASVGDRVTITCRASQNINNWLAWYQQKPGKAPKLLIYKASTLQSGVPSRFSGSGSGTDFTLTISSLQPEDFATYYCQQADSFPPTFGQGTKVEIKR

SEQ ID NO: 9705 - protein, 108 aa, synthetic construct
DIQMTQSPSSLSASVGDRVTITCRASQDISSYLAWYQQKPGKAPKLLIYAASTLQSGVPSRFSGSGSGTDFTLTISSLQPEDFATYYCQQLNRYPITFGQGTKVEIKR

SEQ ID NO: 9706 - protein, 108 aa, synthetic construct
DIQMTQSPSSLSASVGDRVTITCRASQDISNYLAWYQQKPGKAPKLLIYAASILHSGVPSRFSGSGSGTDFTLTISSLQPEDFATYYCQQYDSSFITFGQGTRLEIKR

SEQ ID NO: 9707-9967 - skipped (261 entries)

SEQ ID NO: 9968 - protein, 5 aa, synthetic construct
SYALS

SEQ ID NO: 9969 - protein, 5 aa, synthetic construct
NYAIS

SEQ ID NO: 9970 - protein, 5 aa, synthetic construct
NYAFS

SEQ ID NO: 9971 - protein, 5 aa, synthetic construct
SYALS

SEQ ID NO: 9972 - protein, 5 aa, synthetic construct
GYYMH

SEQ ID NO: 9973 - protein, 5 aa, synthetic construct
SYYMH

SEQ ID NO: 9974 - protein, 5 aa, synthetic construct
SYAIS

SEQ ID NO: 9975 - protein, 5 aa, synthetic construct
DYGIS

SEQ ID NO: 9976 - protein, 5 aa, synthetic construct
GYYMH

SEQ ID NO: 9977 - protein, 5 aa, synthetic construct
DYYLH

SEQ ID NO: 9978 - protein, 5 aa, synthetic construct
SHYMH

SEQ ID NO: 9979 - protein, 5 aa, synthetic construct
SYAIN

SEQ ID NO: 9980 - protein, 5 aa, synthetic construct
NYAIS

SEQ ID NO: 9981 - protein, 5 aa, synthetic construct
NDVIN

SEQ ID NO: 9982 - protein, 5 aa, synthetic construct
SYAIN

SEQ ID NO: 9983 - protein, 5 aa, synthetic construct
SYAIS

SEQ ID NO: 9984 - protein, 5 aa, synthetic construct
SYAIS

SEQ ID NO: 9985 - protein, 5 aa, synthetic construct
SYAIS

SEQ ID NO: 9986 - protein, 5 aa, synthetic construct
SHAIS

SEQ ID NO: 9987 - protein, 5 aa, synthetic construct
SYAIS

SEQ ID NO: 9988 - protein, 5 aa, synthetic construct
SYDIN

SEQ ID NO: 9989 - protein, 5 aa, synthetic construct
SYAIS

SEQ ID NO: 9990 - protein, 5 aa, synthetic construct
SYYIH

SEQ ID NO: 9991 - protein, 5 aa, synthetic construct
TSYIH

SEQ ID NO: 9992 - protein, 5 aa, synthetic construct
SYDIN

SEQ ID NO: 9993 - protein, 5 aa, synthetic construct
SYDIN

SEQ ID NO: 9994 - protein, 5 aa, synthetic construct
SWYMS

SEQ ID NO: 9995 - protein, 5 aa, synthetic construct
GYYMH

SEQ ID NO: 9996 - protein, 5 aa, synthetic construct
NYYIH

SEQ ID NO: 9997 - protein, 5 aa, synthetic construct
DNYIH

SEQ ID NO: 9998 - protein, 5 aa, synthetic construct
DHHVH

SEQ ID NO: 9999 - protein, 5 aa, synthetic construct
DHHVH

SEQ ID NO: 10000 - protein, 5 aa, synthetic construct
SYAIY

SEQ ID NO: 10001 - protein, 5 aa, synthetic construct
DYYMH

SEQ ID NO: 10002 - protein, 5 aa, synthetic construct
SYGIS

SEQ ID NO: 10003 - protein, 5 aa, synthetic construct
NYGIN

SEQ ID NO: 10004 - protein, 5 aa, synthetic construct
RYGIA

SEQ ID NO: 10005 - protein, 5 aa, synthetic construct
RYGIA

SEQ ID NO: 10006 - protein, 5 aa, synthetic construct
SYAIS

SEQ ID NO: 10007 - protein, 5 aa, synthetic construct
SYDIN

SEQ ID NO: 10008 - protein, 5 aa, synthetic construct
NYAIS

SEQ ID NO: 10009 - protein, 5 aa, synthetic construct
GYYMH

SEQ ID NO: 10010 - protein, 5 aa, synthetic construct
SYAIS

SEQ ID NO: 10011 - protein, 5 aa, synthetic construct
SYEMH

SEQ ID NO: 10012 - protein, 5 aa, synthetic construct
SYGIS

SEQ ID NO: 10013 - protein, 5 aa, synthetic construct
SYAIS

SEQ ID NO: 10014 - protein, 5 aa, synthetic construct
NYAIS

SEQ ID NO: 10015 - protein, 5 aa, synthetic construct
RYGIT

SEQ ID NO: 10016 - protein, 5 aa, synthetic construct
SYAIS

SEQ ID NO: 10017 - protein, 5 aa, synthetic construct
GHYMH

SEQ ID NO: 10018 - protein, 5 aa, synthetic construct
NHYTS

SEQ ID NO: 10019 - protein, 5 aa, synthetic construct
SYAIS

SEQ ID NO: 10020 - protein, 5 aa, synthetic construct
TYAIT

SEQ ID NO: 10021 - protein, 5 aa, synthetic construct
GYYMH

SEQ ID NO: 10022 - protein, 5 aa, synthetic construct
TYYIH

SEQ ID NO: 10023 - protein, 5 aa, synthetic construct
SYAIS

SEQ ID NO: 10024 - protein, 5 aa, synthetic construct
SSAIS

SEQ ID NO: 10025 - protein, 5 aa, synthetic construct
DYAMH

SEQ ID NO: 10026 - protein, 5 aa, synthetic construct
SYAIS

SEQ ID NO: 10027 - protein, 5 aa, synthetic construct
IYAIT

SEQ ID NO: 10028 - protein, 5 aa, synthetic construct
SYAIS

SEQ ID NO: 10029 - protein, 5 aa, synthetic construct
SDDIN

SEQ ID NO: 10030 - protein, 5 aa, synthetic construct
NYAIS

SEQ ID NO: 10031 - protein, 5 aa, synthetic construct
DHAIN

SEQ ID NO: 10032 - protein, 5 aa, synthetic construct
SYDIN

SEQ ID NO: 10033 - protein, 5 aa, synthetic construct
SYAIS

SEQ ID NO: 10034 - protein, 5 aa, synthetic construct
AYYLH

SEQ ID NO: 10035 - protein, 5 aa, synthetic construct
SYAMS

SEQ ID NO: 10036 - protein, 5 aa, synthetic construct
DYYVH

SEQ ID NO: 10037 - protein, 5 aa, synthetic construct
DYYVH

SEQ ID NO: 10038 - protein, 5 aa, synthetic construct
SYAMS

SEQ ID NO: 10039 - protein, 5 aa, synthetic construct
SYAMH

SEQ ID NO: 10040 - protein, 5 aa, synthetic construct
NYYIH

SEQ ID NO: 10041 - protein, 5 aa, synthetic construct
SYAIS

SEQ ID NO: 10042 - protein, 5 aa, synthetic construct
NHYTS

SEQ ID NO: 10043 - protein, 5 aa, synthetic construct
SSAMH

SEQ ID NO: 10044 - protein, 5 aa, synthetic construct
SHAIS

SEQ ID NO: 10045 - protein, 5 aa, synthetic construct
AYYMH

SEQ ID NO: 10046 - protein, 5 aa, synthetic construct
SYDIN

SEQ ID NO: 10047 - protein, 5 aa, synthetic construct
SYGIS

SEQ ID NO: 10048 - protein, 5 aa, synthetic construct
NYGIS

SEQ ID NO: 10049 - protein, 5 aa, synthetic construct
TYGIS

SEQ ID NO: 10050 - protein, 5 aa, synthetic construct
GYYMH

SEQ ID NO: 10051 - protein, 5 aa, synthetic construct
TYYVH

SEQ ID NO: 10052 - protein, 5 aa, synthetic construct
SYGIS

SEQ ID NO: 10053 - protein, 5 aa, synthetic construct
SYAMN

SEQ ID NO: 10054 - protein, 5 aa, synthetic construct
SSYMH

SEQ ID NO: 10055 - protein, 5 aa, synthetic construct
GYYMH

SEQ ID NO: 10056 - protein, 5 aa, synthetic construct
SYAFS

SEQ ID NO: 10057 - protein, 5 aa, synthetic construct
SYAIS

SEQ ID NO: 10058 - protein, 5 aa, synthetic construct
SYYIH

SEQ ID NO: 10059 - protein, 5 aa, synthetic construct
NYALN

SEQ ID NO: 10060 - protein, 5 aa, synthetic construct
SYAIS

SEQ ID NO: 10061 - protein, 5 aa, synthetic construct
SYYMH

SEQ ID NO: 10062 - protein, 5 aa, synthetic construct
AYYVH

SEQ ID NO: 10063 - protein, 5 aa, synthetic construct
SYDIN

SEQ ID NO: 10064 - protein, 5 aa, synthetic construct
DYGMH

SEQ ID NO: 10065 - protein, 5 aa, synthetic construct
SYDIS

SEQ ID NO: 10066 - protein, 5 aa, synthetic construct
SYGIS

SEQ ID NO: 10067 - protein, 5 aa, synthetic construct
DYYIH

SEQ ID NO: 10068 - protein, 5 aa, synthetic construct
SYGIS

SEQ ID NO: 10069 - protein, 5 aa, synthetic construct
NNDIN

SEQ ID NO: 10070 - protein, 5 aa, synthetic construct
EYAIH

SEQ ID NO: 10071 - protein, 5 aa, synthetic construct
DYSMS

SEQ ID NO: 10072 - protein, 5 aa, synthetic construct
TYYMH

SEQ ID NO: 10073 - protein, 5 aa, synthetic construct
NYAID

SEQ ID NO: 10074 - protein, 5 aa, synthetic construct
THWMH

SEQ ID NO: 10075 - protein, 5 aa, synthetic construct
THWMH

SEQ ID NO: 10076 - protein, 5 aa, synthetic construct
SYAIS

SEQ ID NO: 10077 - protein, 5 aa, synthetic construct
SYYLH

SEQ ID NO: 10078 - protein, 5 aa, synthetic construct
SYAIS

SEQ ID NO: 10079 - protein, 5 aa, synthetic construct
DYGMS

SEQ ID NO: 10080 - protein, 5 aa, synthetic construct
DYYMH

SEQ ID NO: 10081 - protein, 5 aa, synthetic construct
NYAFS

SEQ ID NO: 10082 - protein, 5 aa, synthetic construct
SYAIS

SEQ ID NO: 10083 - protein, 5 aa, synthetic construct
NHYTS

SEQ ID NO: 10084 - protein, 5 aa, synthetic construct
NYAIS

SEQ ID NO: 10085 - protein, 5 aa, synthetic construct
DHHVH

SEQ ID NO: 10086 - protein, 5 aa, synthetic construct
SYAMS

SEQ ID NO: 10087 - protein, 5 aa, synthetic construct
SYWMH

SEQ ID NO: 10088 - protein, 5 aa, synthetic construct
SYWMH

SEQ ID NO: 10089 - protein, 5 aa, synthetic construct
DHYMD

SEQ ID NO: 10090 - protein, 5 aa, synthetic construct
SYYMH

SEQ ID NO: 10091 - protein, 5 aa, synthetic construct
GYYMH

SEQ ID NO: 10092 - protein, 5 aa, synthetic construct
SYVLH

SEQ ID NO: 10093 - protein, 5 aa, synthetic construct
SHWMH

SEQ ID NO: 10094 - protein, 5 aa, synthetic construct
SYAIS

SEQ ID NO: 10095 - protein, 5 aa, synthetic construct
DYYMH

SEQ ID NO: 10096 - protein, 5 aa, synthetic construct
SYWMH

SEQ ID NO: 10097 - protein, 5 aa, synthetic construct
SYAIS

SEQ ID NO: 10098-10229 - skipped (132 entries)

SEQ ID NO: 10230 - protein, 16 aa, synthetic construct
IINPSGGTNYAQKFQG

SEQ ID NO: 10231 - protein, 17 aa, synthetic construct
IIDPSGGSTTYAQKFQG

SEQ ID NO: 10232 - protein, 17 aa, synthetic construct
IINPSGGSTSYAQKFQG

SEQ ID NO: 10233 - protein, 16 aa, synthetic construct
IINPSGGTNYAQKFQG

SEQ ID NO: 10234 - protein, 17 aa, synthetic construct
WIDPNGGGTQYAQKFQG

SEQ ID NO: 10235 - protein, 17 aa, synthetic construct
IINPSGGSTSYAQKFQG

SEQ ID NO: 10236 - protein, 17 aa, synthetic construct
IINPSGGSTNYAQKFQG

SEQ ID NO: 10237 - protein, 17 aa, synthetic construct
IINPSGGSTSYAQKFQG

SEQ ID NO: 10238 - protein, 17 aa, synthetic construct
WMNPHSGDTGYAQKFQG

SEQ ID NO: 10239 - protein, 17 aa, synthetic construct
IIDPSGGSTSIAQKFQG

SEQ ID NO: 10240 - protein, 17 aa, synthetic construct
IIDPSGGSTSYAQEFQG

SEQ ID NO: 10241 - protein, 17 aa, synthetic construct
WVNPNSGDTAYAQKFQG

SEQ ID NO: 10242 - protein, 17 aa, synthetic construct
IITPSGGSTTYAHKFQG

SEQ ID NO: 10243 - protein, 17 aa, synthetic construct
WMNPNSGNTGYAQKFQG

SEQ ID NO: 10244 - protein, 17 aa, synthetic construct
WISAYNGNTNYAQKFQG

SEQ ID NO: 10245 - protein, 17 aa, synthetic construct
WINPNSGGTNYAQKFQG

SEQ ID NO: 10246 - protein, 17 aa, synthetic construct
WINPNSGGTNYAQKFQG

SEQ ID NO: 10247 - protein, 17 aa, synthetic construct
WINPNSGGTNYAQKFQG

SEQ ID NO: 10248 - protein, 17 aa, synthetic construct
IINPSGGSTSYAQKFQG

SEQ ID NO: 10249 - protein, 17 aa, synthetic construct
WINPNSGGTNYAQKFQG

SEQ ID NO: 10250 - protein, 17 aa, synthetic construct
WINPNSGDTKYAQNFQG

SEQ ID NO: 10251 - protein, 17 aa, synthetic construct
WISVYNGNTNYAQNLQG

SEQ ID NO: 10252 - protein, 17 aa, synthetic construct
WINPNNGGTHYAQKFQG

SEQ ID NO: 10253 - protein, 17 aa, synthetic construct
MINPSGGTTTYAQKFQG

SEQ ID NO: 10254 - protein, 17 aa, synthetic construct
GIIPLSGAPNYAHKFQG

SEQ ID NO: 10255 - protein, 17 aa, synthetic construct
GIIPLSGAPNYAHKFQG

SEQ ID NO: 10256 - protein, 17 aa, synthetic construct
GIWYEGSNKYYADSVKG

SEQ ID NO: 10257 - protein, 17 aa, synthetic construct
WINPNRGDTKYAQKFQG

SEQ ID NO: 10258 - protein, 17 aa, synthetic construct
WMNPNSGNTGYAQKFQG

SEQ ID NO: 10259 - protein, 17 aa, synthetic construct
WIRSDNGETSYAQKFQG

SEQ ID NO: 10260 - protein, 17 aa, synthetic construct
GIIPIFGTANYAQKFQG

SEQ ID NO: 10261 - protein, 17 aa, synthetic construct
GIIPIFGTANYAQKFQG

SEQ ID NO: 10262 - protein, 17 aa, synthetic construct
GIIPIFGTTNYAQKFQG

SEQ ID NO: 10263 - protein, 17 aa, synthetic construct
WIHSNSGGTHSAQKFQG

SEQ ID NO: 10264 - protein, 17 aa, synthetic construct
WINPNSGDTDYAQKFQG

SEQ ID NO: 10265 - protein, 17 aa, synthetic construct
WISAYNGNTNYAQKFQG

SEQ ID NO: 10266 - protein, 17 aa, synthetic construct
ISYPSDGSTSSAQKLQG

SEQ ID NO: 10267 - protein, 17 aa, synthetic construct
ISYPSDGSTSSAQKLQG

SEQ ID NO: 10268 - protein, 17 aa, synthetic construct
WMNPNSGNTGYAQKFQG

SEQ ID NO: 10269 - protein, 17 aa, synthetic construct
TITPIFGTTDYAQKFQG

SEQ ID NO: 10270 - protein, 17 aa, synthetic construct
IIDPSGGSTSYAQKFQG

SEQ ID NO: 10271 - protein, 17 aa, synthetic construct
WMNPNSGDTGYAQRFQG

SEQ ID NO: 10272 - protein, 17 aa, synthetic construct
YMSPNSGNTGYAQKFQG

SEQ ID NO: 10273 - protein, 17 aa, synthetic construct
AISSNGGSTYYADSVKG

SEQ ID NO: 10274 - protein, 17 aa, synthetic construct
WIDPTSGATDTAHKFQG

SEQ ID NO: 10275 - protein, 17 aa, synthetic construct
WMSPNSGNTGYAQKFQG

SEQ ID NO: 10276 - protein, 17 aa, synthetic construct
WMNPNSGNTGYAQKFQG

SEQ ID NO: 10277 - protein, 17 aa, synthetic construct
WMNPYDGNTGYAQKFQG

SEQ ID NO: 10278 - protein, 17 aa, synthetic construct
IINPSGDGTNYAQKFQG

SEQ ID NO: 10279 - protein, 17 aa, synthetic construct
WISAYNGDTNYAQKFQG

SEQ ID NO: 10280 - protein, 16 aa, synthetic construct
AIGAGGGTYYADSVKG

SEQ ID NO: 10281 - protein, 17 aa, synthetic construct
IINPSAGTTYYAERFQG

SEQ ID NO: 10282 - protein, 17 aa, synthetic construct
EIIPIFGTANYAQKFQG

SEQ ID NO: 10283 - protein, 17 aa, synthetic construct
WMNPNSGKTEYAQKFQG

SEQ ID NO: 10284 - protein, 17 aa, synthetic construct
WMNPNTGDTGSAQKFQG

SEQ ID NO: 10285 - protein, 17 aa, synthetic construct
IIDPSGGGTSYAQKLQG

SEQ ID NO: 10286 - protein, 17 aa, synthetic construct
GIIPIFGTANYAQKFQG

SEQ ID NO: 10287 - protein, 17 aa, synthetic construct
GISGGGGVTYYADSVKG

SEQ ID NO: 10288 - protein, 17 aa, synthetic construct
WISGYNGNTNYAQKFQG

SEQ ID NO: 10289 - protein, 17 aa, synthetic construct
WVNPNSGNTGYSQKFQG

SEQ ID NO: 10290 - protein, 17 aa, synthetic construct
WINPNSGGTNYAQKFQG

SEQ ID NO: 10291 - protein, 17 aa, synthetic construct
IINPSGGSTSYAQKFQG

SEQ ID NO: 10292 - protein, 17 aa, synthetic construct
WMNPNSGNTGYAQKFQG

SEQ ID NO: 10293 - protein, 17 aa, synthetic construct
WMNPKIGNTGYAQKFQG

SEQ ID NO: 10294 - protein, 17 aa, synthetic construct
RINPGTGGTDYAHKFQG

SEQ ID NO: 10295 - protein, 16 aa, synthetic construct
IIIPSGGTNYAQTFQG

SEQ ID NO: 10296 - protein, 17 aa, synthetic construct
WINPDNDNAYYAQKFQG

SEQ ID NO: 10297 - protein, 17 aa, synthetic construct
VISYDGSDQYYADSVKG

SEQ ID NO: 10298 - protein, 17 aa, synthetic construct
WISTFTGNTDYAQNFQG

SEQ ID NO: 10299 - protein, 17 aa, synthetic construct
WISTFTGNTDYAQNFQG

SEQ ID NO: 10300 - protein, 17 aa, synthetic construct
FISDDGITKYYADSVKG

SEQ ID NO: 10301 - protein, 17 aa, synthetic construct
VISYDGGDKYYADSVKG

SEQ ID NO: 10302 - protein, 17 aa, synthetic construct
WINPNTGGTDYAQKFQG

SEQ ID NO: 10303 - protein, 17 aa, synthetic construct
RINPNSGNTGYAQKFQG

SEQ ID NO: 10304 - protein, 17 aa, synthetic construct
VISYDGSNKYYADSVKG

SEQ ID NO: 10305 - protein, 17 aa, synthetic construct
SISGSGDNAYYADSVKG

SEQ ID NO: 10306 - protein, 17 aa, synthetic construct
GIIPIFGTANYAQKFQG

SEQ ID NO: 10307 - protein, 17 aa, synthetic construct
RISPVFGSTTYAQRFQG

SEQ ID NO: 10308 - protein, 17 aa, synthetic construct
GISPMFGTANYAQKFQG

SEQ ID NO: 10309 - protein, 17 aa, synthetic construct
WINPNSGGTKYAQKFQG

SEQ ID NO: 10310 - protein, 17 aa, synthetic construct
WINPNNGDTKYAQKFQG

SEQ ID NO: 10311 - protein, 17 aa, synthetic construct
WISTYDGKTNYAQKLQG

SEQ ID NO: 10312 - protein, 17 aa, synthetic construct
WINPNTGATYYAQKFQG

SEQ ID NO: 10313 - protein, 17 aa, synthetic construct
WINPNSGNTGYAQKFQG

SEQ ID NO: 10314 - protein, 17 aa, synthetic construct
RIIPMLGIANYAQKFQG

SEQ ID NO: 10315 - protein, 17 aa, synthetic construct
IINPSGGSTSYARKFQG

SEQ ID NO: 10316 - protein, 17 aa, synthetic construct
WMNPRSGNTGYAQKFQG

SEQ ID NO: 10317 - protein, 17 aa, synthetic construct
IINPSGGSTSYAQKFQG

SEQ ID NO: 10318 - protein, 17 aa, synthetic construct
WINPNSGGTNYAQKFQG

SEQ ID NO: 10319 - protein, 17 aa, synthetic construct
IINPNGGNTSYAQKFQG

SEQ ID NO: 10320 - protein, 17 aa, synthetic construct
VINPADGDTTYAQMFQG

SEQ ID NO: 10321 - protein, 17 aa, synthetic construct
RINPNGGTTYYAKNFQG

SEQ ID NO: 10322 - protein, 17 aa, synthetic construct
MINPNVGSATYAQRFQG

SEQ ID NO: 10323 - protein, 17 aa, synthetic construct
IINPSDGSTSYAQRFQG

SEQ ID NO: 10324 - protein, 17 aa, synthetic construct
WMNPNSGTTGYAQKFQG

SEQ ID NO: 10325 - protein, 17 aa, synthetic construct
VISPSGDATLYAQSFQG

SEQ ID NO: 10326 - protein, 17 aa, synthetic construct
AIGGIGDSTYYADSVKG

SEQ ID NO: 10327 - protein, 17 aa, synthetic construct
MISPSDGSTTYAPKFQG

SEQ ID NO: 10328 - protein, 17 aa, synthetic construct
WINTYSGYTDYAHKFQG

SEQ ID NO: 10329 - protein, 17 aa, synthetic construct
GIIPYFGTANYAQKFQG

SEQ ID NO: 10330 - protein, 17 aa, synthetic construct
GIIPIFGTANYAQKFQG

SEQ ID NO: 10331 - protein, 17 aa, synthetic construct
WINPIYGSANYAQNFQG

SEQ ID NO: 10332 - protein, 17 aa, synthetic construct
RMNPHNGDTGYAQKFQG

SEQ ID NO: 10333 - protein, 17 aa, synthetic construct
AIWQDGNVKFYADSVKG

SEQ ID NO: 10334 - protein, 17 aa, synthetic construct
WINPNTGDTAYAQKIQG

SEQ ID NO: 10335 - protein, 17 aa, synthetic construct
GIIPLFGTTTYAQKFQG

SEQ ID NO: 10336 - protein, 17 aa, synthetic construct
MINPSDGVTYYAQTFQG

SEQ ID NO: 10337 - protein, 17 aa, synthetic construct
MINPSDGVTYYAQTFQG

SEQ ID NO: 10338 - protein, 17 aa, synthetic construct
IINPSGGSTSNAQKFQG

SEQ ID NO: 10339 - protein, 17 aa, synthetic construct
IITPSGGSTTYAHKFQG

SEQ ID NO: 10340 - protein, 17 aa, synthetic construct
WMNPNSGNTGYAQKFQG

SEQ ID NO: 10341 - protein, 16 aa, synthetic construct
LIYSGGDTYYADSVKG

SEQ ID NO: 10342 - protein, 17 aa, synthetic construct
GINPIFGTSNYAQKFQG

SEQ ID NO: 10343 - protein, 17 aa, synthetic construct
MIDPSDGTIAYAQKFQG

SEQ ID NO: 10344 - protein, 17 aa, synthetic construct
TIDPNSGGTMFAQKFQG

SEQ ID NO: 10345 - protein, 16 aa, synthetic construct
SIGVNGDTYYLDSVKG

SEQ ID NO: 10346 - protein, 17 aa, synthetic construct
RINPNGGNTSNAQKFQG

SEQ ID NO: 10347 - protein, 17 aa, synthetic construct
WMNPDSGNTGYAQRFQG

SEQ ID NO: 10348 - protein, 17 aa, synthetic construct
VISYDGHDQFYADSVKG

SEQ ID NO: 10349 - protein, 17 aa, synthetic construct
VISYDGSKEYYADSVKG

SEQ ID NO: 10350 - protein, 17 aa, synthetic construct
GISGGGDDTYYADSVKG

SEQ ID NO: 10351 - protein, 16 aa, synthetic construct
AIGTGGDTYYADSVKG

SEQ ID NO: 10352 - protein, 17 aa, synthetic construct
MISPSDGSTTYAPKFQG

SEQ ID NO: 10353 - protein, 17 aa, synthetic construct
WMNPNSGNTGYAQKFQG

SEQ ID NO: 10354 - protein, 17 aa, synthetic construct
AISGAGDSTYYADSVKG

SEQ ID NO: 10355 - protein, 17 aa, synthetic construct
AISGNGDNSYYADSVKG

SEQ ID NO: 10356 - protein, 17 aa, synthetic construct
WINPNSGGTNYAQKFQG

SEQ ID NO: 10357 - protein, 17 aa, synthetic construct
WMNPNSGHTGYAEKFQG

SEQ ID NO: 10358 - protein, 17 aa, synthetic construct
VTSYDGSNKYYADSVKG

SEQ ID NO: 10359 - protein, 17 aa, synthetic construct
IINPSGGSTSYAQKFQG

SEQ ID NO: 10360-10491 - skipped (132 entries)

SEQ ID NO: 10492 - protein, 9 aa, synthetic construct
DLGDPGMDV

SEQ ID NO: 10493 - protein, 9 aa, synthetic construct
DLGDMGMDV

SEQ ID NO: 10494 - protein, 9 aa, synthetic construct
DVGDRGMDV

SEQ ID NO: 10495 - protein, 9 aa, synthetic construct
DLGDPGMDV

SEQ ID NO: 10496 - protein, 12 aa, synthetic construct
DIVHDGTEYFQH

SEQ ID NO: 10497 - protein, 12 aa, synthetic construct
DIVHDGTEYFQH

SEQ ID NO: 10498 - protein, 10 aa, synthetic construct
EGRDHDAFDI

SEQ ID NO: 10499 - protein, 10 aa, synthetic construct
EGRSHDAFDI

SEQ ID NO: 10500 - protein, 15 aa, synthetic construct
WVGTTEYYYYYYMDV

SEQ ID NO: 10501 - protein, 14 aa, synthetic construct
TAYYDFWSGYSMDV

SEQ ID NO: 10502 - protein, 15 aa, synthetic construct
DMDNWNTGYYYYMDV

SEQ ID NO: 10503 - protein, 10 aa, synthetic construct
DQRGGDAWDV

SEQ ID NO: 10504 - protein, 8 aa, synthetic construct
DTAGHFDI

SEQ ID NO: 10505 - protein, 10 aa, synthetic construct
DNPDLDGMDV

SEQ ID NO: 10506 - protein, 8 aa, synthetic construct
DLVGHFDY

SEQ ID NO: 10507 - protein, 9 aa, synthetic construct
DGYSGSYSD

SEQ ID NO: 10508 - protein, 9 aa, synthetic construct
DGYSGSYSD

SEQ ID NO: 10509 - protein, 9 aa, synthetic construct
DGYSGSYSD

SEQ ID NO: 10510 - protein, 10 aa, synthetic construct
DQGSSGTFDY

SEQ ID NO: 10511 - protein, 8 aa, synthetic construct
DSTDVIDY

SEQ ID NO: 10512 - protein, 18 aa, synthetic construct
DGGTVTPTEEYYYYGMDV

SEQ ID NO: 10513 - protein, 6 aa, synthetic construct
LDDLDY

SEQ ID NO: 10514 - protein, 12 aa, synthetic construct
DMVRDSAEYFQH

SEQ ID NO: 10515 - protein, 9 aa, synthetic construct
DSSGYPIDY

SEQ ID NO: 10516 - protein, 13 aa, synthetic construct
GALYNWNDGWFDP

SEQ ID NO: 10517 - protein, 13 aa, synthetic construct
GALYNWNDGWFDP

SEQ ID NO: 10518 - protein, 11 aa, synthetic construct
LGTASLPYFDY

SEQ ID NO: 10519 - protein, 8 aa, synthetic construct
ESGDGFDP

SEQ ID NO: 10520 - protein, 8 aa, synthetic construct
DWPNWFDP

SEQ ID NO: 10521 - protein, 9 aa, synthetic construct
EVQLVGFDY

SEQ ID NO: 10522 - protein, 10 aa, synthetic construct
GSSWYLHFQH

SEQ ID NO: 10523 - protein, 10 aa, synthetic construct
GSSWYLHFQH

SEQ ID NO: 10524 - protein, 13 aa, synthetic construct
GVDRYNWNDAFDY

SEQ ID NO: 10525 - protein, 11 aa, synthetic construct
ESSGYDSSLDY

SEQ ID NO: 10526 - protein, 11 aa, synthetic construct
DPRLDSSDPGY

SEQ ID NO: 10527 - protein, 5 aa, synthetic construct
GGMDV

SEQ ID NO: 10528 - protein, 8 aa, synthetic construct
DRLGDLDY

SEQ ID NO: 10529 - protein, 8 aa, synthetic construct
DRLGDLDY

SEQ ID NO: 10530 - protein, 11 aa, synthetic construct
DSIVGGYPFDY

SEQ ID NO: 10531 - protein, 14 aa, synthetic construct
EGYSSSWHDDAFDI

SEQ ID NO: 10532 - protein, 9 aa, synthetic construct
DLGDYGLDS

SEQ ID NO: 10533 - protein, 16 aa, synthetic construct
GGSDSSGYYYEGYFQH

SEQ ID NO: 10534 - protein, 14 aa, synthetic construct
DKGGYYDSSGYYWY

SEQ ID NO: 10535 - protein, 13 aa, synthetic construct
VGDGDGYNPDFDY

SEQ ID NO: 10536 - protein, 10 aa, synthetic construct
DPIVATEVDY

SEQ ID NO: 10537 - protein, 7 aa, synthetic construct
DSGAFDI

SEQ ID NO: 10538 - protein, 9 aa, synthetic construct
EGLLDAFDI

SEQ ID NO: 10539 - protein, 10 aa, synthetic construct
GGRHHDAFDI

SEQ ID NO: 10540 - protein, 9 aa, synthetic construct
DISNDAFDI

SEQ ID NO: 10541 - protein, 10 aa, synthetic construct
GSSWDDAFDI

SEQ ID NO: 10542 - protein, 10 aa, synthetic construct
EGWNDDVFDI

SEQ ID NO: 10543 - protein, 9 aa, synthetic construct
DGNFGAFDI

SEQ ID NO: 10544 - protein, 18 aa, synthetic construct
DKSGWNYGSGSYNDAFDI

SEQ ID NO: 10545 - protein, 8 aa, synthetic construct
DGGLDFDY

SEQ ID NO: 10546 - protein, 11 aa, synthetic construct
DPAVTPDAFDI

SEQ ID NO: 10547 - protein, 9 aa, synthetic construct
SLYYYGMDV

SEQ ID NO: 10548 - protein, 12 aa, synthetic construct
EDDILPPRAFDI

SEQ ID NO: 10549 - protein, 12 aa, synthetic construct
VYSSGWLDAFDI

SEQ ID NO: 10550 - protein, 10 aa, synthetic construct
SDVSPDAFDI

SEQ ID NO: 10551 - protein, 11 aa, synthetic construct
PTSSSDDAFDI

SEQ ID NO: 10552 - protein, 10 aa, synthetic construct
ASRGDDAFDI

SEQ ID NO: 10553 - protein, 20 aa, synthetic construct
ERYEGGYSSGPGNYYYGMDV

SEQ ID NO: 10554 - protein, 9 aa, synthetic construct
DDDYGDYPV

SEQ ID NO: 10555 - protein, 10 aa, synthetic construct
DSSGYDAFDI

SEQ ID NO: 10556 - protein, 20 aa, synthetic construct
ETPSDYYDSSGYYYNDAFDI

SEQ ID NO: 10557 - protein, 8 aa, synthetic construct
DLGTTFDI

SEQ ID NO: 10558 - protein, 13 aa, synthetic construct
DIAVAALAYGMDV

SEQ ID NO: 10559 - protein, 11 aa, synthetic construct
QSLYYYYGMDV

SEQ ID NO: 10560 - protein, 17 aa, synthetic construct
DAPLAAAGTDYYYGMDV

SEQ ID NO: 10561 - protein, 17 aa, synthetic construct
DAPLAAAGTDYYYGMDV

SEQ ID NO: 10562 - protein, 11 aa, synthetic construct
DDSSGYGGMDV

SEQ ID NO: 10563 - protein, 12 aa, synthetic construct
GSLVLGYYYMDV

SEQ ID NO: 10564 - protein, 12 aa, synthetic construct
GGGGSYYDAFDV

SEQ ID NO: 10565 - protein, 10 aa, synthetic construct
DIGEGYSMDV

SEQ ID NO: 10566 - protein, 17 aa, synthetic construct
EEKYSSSWYVGVDAFDI

SEQ ID NO: 10567 - protein, 16 aa, synthetic construct
DQEDYYYDSSGYGMDV

SEQ ID NO: 10568 - protein, 17 aa, synthetic construct
GDWGIVVVPAAIGAFDI

SEQ ID NO: 10569 - protein, 17 aa, synthetic construct
DLGYYDSSGYRYDAFDI

SEQ ID NO: 10570 - protein, 9 aa, synthetic construct
DGWYYGMDV

SEQ ID NO: 10571 - protein, 12 aa, synthetic construct
GEAGNLDWYFDL

SEQ ID NO: 10572 - protein, 8 aa, synthetic construct
EDVWYFDL

SEQ ID NO: 10573 - protein, 10 aa, synthetic construct
HLGGDWYFDL

SEQ ID NO: 10574 - protein, 11 aa, synthetic construct
QHGDYDWYFDL

SEQ ID NO: 10575 - protein, 5 aa, synthetic construct
DSGRH

SEQ ID NO: 10576 - protein, 11 aa, synthetic construct
EEVAGANWFDP

SEQ ID NO: 10577 - protein, 11 aa, synthetic construct
EGDYGSGEFDY

SEQ ID NO: 10578 - protein, 13 aa, synthetic construct
ERDDYGDYGWLDY

SEQ ID NO: 10579 - protein, 17 aa, synthetic construct
DLYDSSGYWHYYYYMDV

SEQ ID NO: 10580 - protein, 9 aa, synthetic construct
FSGYDYVDY

SEQ ID NO: 10581 - protein, 8 aa, synthetic construct
DVGEDFDL

SEQ ID NO: 10582 - protein, 10 aa, synthetic construct
DFDWLFAMDV

SEQ ID NO: 10583 - protein, 8 aa, synthetic construct
HGDHGFYV

SEQ ID NO: 10584 - protein, 10 aa, synthetic construct
EDSGTSWFDP

SEQ ID NO: 10585 - protein, 13 aa, synthetic construct
DDRGSNYYYGMDV

SEQ ID NO: 10586 - protein, 16 aa, synthetic construct
DSSDYYGDYRADAFDI

SEQ ID NO: 10587 - protein, 4 aa, synthetic construct
GLDH

SEQ ID NO: 10588 - protein, 16 aa, synthetic construct
MNYGDSNYYYYYGMDV

SEQ ID NO: 10589 - protein, 7 aa, synthetic construct
GAVGFDY

SEQ ID NO: 10590 - protein, 8 aa, synthetic construct
DDFLSFGY

SEQ ID NO: 10591 - protein, 13 aa, synthetic construct
SISGSYVLDAFDI

SEQ ID NO: 10592 - protein, 14 aa, synthetic construct
DWGYGDYADDAFDI

SEQ ID NO: 10593 - protein, 7 aa, synthetic construct
DWRGFDY

SEQ ID NO: 10594 - protein, 11 aa, synthetic construct
EGDYLGYPIDC

SEQ ID NO: 10595 - protein, 8 aa, synthetic construct
DGNSGYVF

SEQ ID NO: 10596 - protein, 13 aa, synthetic construct
TAEAVAGLPAFDY

SEQ ID NO: 10597 - protein, 9 aa, synthetic construct
VTLYGDYDY

SEQ ID NO: 10598 - protein, 9 aa, synthetic construct
EYYGEGFDY

SEQ ID NO: 10599 - protein, 9 aa, synthetic construct
EYYGEGFDY

SEQ ID NO: 10600 - protein, 9 aa, synthetic construct
DLGDTAMDG

SEQ ID NO: 10601 - protein, 9 aa, synthetic construct
DGGLASFDY

SEQ ID NO: 10602 - protein, 12 aa, synthetic construct
GGGWAMTDAFDI

SEQ ID NO: 10603 - protein, 16 aa, synthetic construct
KEYYYDSSGYLRLFDY

SEQ ID NO: 10604 - protein, 14 aa, synthetic construct
DISGYDYYYYGMDV

SEQ ID NO: 10605 - protein, 15 aa, synthetic construct
SDYDFWSGLGGYFDY

SEQ ID NO: 10606 - protein, 13 aa, synthetic construct
DSAEWELGGSFDY

SEQ ID NO: 10607 - protein, 15 aa, synthetic construct
EGLVFSGRGHWYFDL

SEQ ID NO: 10608 - protein, 9 aa, synthetic construct
DYEDADFDG

SEQ ID NO: 10609 - protein, 8 aa, synthetic construct
DSTSGVDY

SEQ ID NO: 10610 - protein, 16 aa, synthetic construct
GEQQLEGFYYYYGMDV

SEQ ID NO: 10611 - protein, 10 aa, synthetic construct
DYGDYGTYDY

SEQ ID NO: 10612 - protein, 16 aa, synthetic construct
EPLAYCGGDCPGGFDY

SEQ ID NO: 10613 - protein, 10 aa, synthetic construct
HEDTAIFLDY

SEQ ID NO: 10614 - protein, 12 aa, synthetic construct
DGYDAWSYGMDV

SEQ ID NO: 10615 - protein, 8 aa, synthetic construct
DGVTGTDY

SEQ ID NO: 10616 - protein, 13 aa, synthetic construct
EPTTVTDDWYFDL

SEQ ID NO: 10617 - protein, 9 aa, synthetic construct
DRAPEYFDL

SEQ ID NO: 10618 - protein, 12 aa, synthetic construct
DDYGDYGGGMDV

SEQ ID NO: 10619 - protein, 13 aa, synthetic construct
DTSPRYGDGFFDY

SEQ ID NO: 10620 - protein, 11 aa, synthetic construct
ESGFSAEYFQH

SEQ ID NO: 10621 - protein, 13 aa, synthetic construct
ATGLYCSGSCFDY

SEQ ID NO: 10622-10884 - skipped (263 entries)

SEQ ID NO: 10885 - protein, 7 aa, synthetic construct
GGTFSSY

SEQ ID NO: 10886 - protein, 7 aa, synthetic construct
GGTFSNY

SEQ ID NO: 10887 - protein, 7 aa, synthetic construct
GGTFSNY

SEQ ID NO: 10888 - protein, 7 aa, synthetic construct
GGTFSSY

SEQ ID NO: 10889 - protein, 7 aa, synthetic construct
GSTFSGY

SEQ ID NO: 10890 - protein, 7 aa, synthetic construct
GYTFTSY

SEQ ID NO: 10891 - protein, 7 aa, synthetic construct
GGTFSSY

SEQ ID NO: 10892 - protein, 7 aa, synthetic construct
GFTFTDY

SEQ ID NO: 10893 - protein, 7 aa, synthetic construct
GYTFTGY

SEQ ID NO: 10894 - protein, 7 aa, synthetic construct
GYTFTDY

SEQ ID NO: 10895 - protein, 7 aa, synthetic construct
GYTFTSH

SEQ ID NO: 10896 - protein, 7 aa, synthetic construct
GGTFSSY

SEQ ID NO: 10897 - protein, 7 aa, synthetic construct
GGTFSNY

SEQ ID NO: 10898 - protein, 7 aa, synthetic construct
GGTFRND

SEQ ID NO: 10899 - protein, 7 aa, synthetic construct
GGTFSSY

SEQ ID NO: 10900 - protein, 7 aa, synthetic construct
GGTFSSY

SEQ ID NO: 10901 - protein, 7 aa, synthetic construct
GGTFSSY

SEQ ID NO: 10902 - protein, 7 aa, synthetic construct
GGTFSSY

SEQ ID NO: 10903 - protein, 7 aa, synthetic construct
GNTLSSH

SEQ ID NO: 10904 - protein, 7 aa, synthetic construct
GGTLSSY

SEQ ID NO: 10905 - protein, 7 aa, synthetic construct
GYIFTSY

SEQ ID NO: 10906 - protein, 7 aa, synthetic construct
GGTFSSY

SEQ ID NO: 10907 - protein, 7 aa, synthetic construct
GHTFTSY

SEQ ID NO: 10908 - protein, 7 aa, synthetic construct
GYTFITS

SEQ ID NO: 10909 - protein, 7 aa, synthetic construct
GYTFTSY

SEQ ID NO: 10910 - protein, 7 aa, synthetic construct
GYTFTSY

SEQ ID NO: 10911 - protein, 7 aa, synthetic construct
GFTVGSW

SEQ ID NO: 10912 - protein, 7 aa, synthetic construct
GYTFTGY

SEQ ID NO: 10913 - protein, 7 aa, synthetic construct
GYTFTNY

SEQ ID NO: 10914 - protein, 7 aa, synthetic construct
GYSFTDN

SEQ ID NO: 10915 - protein, 7 aa, synthetic construct
GYTFSDH

SEQ ID NO: 10916 - protein, 7 aa, synthetic construct
GYTFSDH

SEQ ID NO: 10917 - protein, 7 aa, synthetic construct
GGTFSSY

SEQ ID NO: 10918 - protein, 7 aa, synthetic construct
GYTFTDY

SEQ ID NO: 10919 - protein, 7 aa, synthetic construct
GGTFSSY

SEQ ID NO: 10920 - protein, 7 aa, synthetic construct
GGTFGNY

SEQ ID NO: 10921 - protein, 7 aa, synthetic construct
GGTFSRY

SEQ ID NO: 10922 - protein, 7 aa, synthetic construct
GGTFSRY

SEQ ID NO: 10923 - protein, 7 aa, synthetic construct
GGTFSSY

SEQ ID NO: 10924 - protein, 7 aa, synthetic construct
GYTFTSY

SEQ ID NO: 10925 - protein, 7 aa, synthetic construct
GGTFSNY

SEQ ID NO: 10926 - protein, 7 aa, synthetic construct
GYTFTGY

SEQ ID NO: 10927 - protein, 7 aa, synthetic construct
GGTFSSY

SEQ ID NO: 10928 - protein, 7 aa, synthetic construct
GFSLSSY

SEQ ID NO: 10929 - protein, 7 aa, synthetic construct
GYTFTSY

SEQ ID NO: 10930 - protein, 7 aa, synthetic construct
GGTFSSY

SEQ ID NO: 10931 - protein, 7 aa, synthetic construct
GVTISNY

SEQ ID NO: 10932 - protein, 7 aa, synthetic construct
GGTFSRY

SEQ ID NO: 10933 - protein, 7 aa, synthetic construct
GGTFSSY

SEQ ID NO: 10934 - protein, 7 aa, synthetic construct
GYILTGH

SEQ ID NO: 10935 - protein, 7 aa, synthetic construct
GFTFSNH

SEQ ID NO: 10936 - protein, 7 aa, synthetic construct
GGTFSSY

SEQ ID NO: 10937 - protein, 7 aa, synthetic construct
GYSFTTY

SEQ ID NO: 10938 - protein, 7 aa, synthetic construct
GYAFTGY

SEQ ID NO: 10939 - protein, 7 aa, synthetic construct
GYTFTTY

SEQ ID NO: 10940 - protein, 7 aa, synthetic construct
GGTLSSY

SEQ ID NO: 10941 - protein, 7 aa, synthetic construct
GGTFGSS

SEQ ID NO: 10942 - protein, 7 aa, synthetic construct
GFTFDDY

SEQ ID NO: 10943 - protein, 7 aa, synthetic construct
GGTFSSY

SEQ ID NO: 10944 - protein, 7 aa, synthetic construct
GGTQNIY

SEQ ID NO: 10945 - protein, 7 aa, synthetic construct
GGTFSSY

SEQ ID NO: 10946 - protein, 7 aa, synthetic construct
GIPFTSD

SEQ ID NO: 10947 - protein, 7 aa, synthetic construct
GGTFSNY

SEQ ID NO: 10948 - protein, 7 aa, synthetic construct
GDTFSDH

SEQ ID NO: 10949 - protein, 7 aa, synthetic construct
GYTFTSY

SEQ ID NO: 10950 - protein, 7 aa, synthetic construct
GGTFSSY

SEQ ID NO: 10951 - protein, 7 aa, synthetic construct
GYTFTAY

SEQ ID NO: 10952 - protein, 7 aa, synthetic construct
GFTFSSY

SEQ ID NO: 10953 - protein, 7 aa, synthetic construct
GYTFTDY

SEQ ID NO: 10954 - protein, 7 aa, synthetic construct
GYTFTDY

SEQ ID NO: 10955 - protein, 7 aa, synthetic construct
GFTFSSY

SEQ ID NO: 10956 - protein, 7 aa, synthetic construct
GFTFSSY

SEQ ID NO: 10957 - protein, 7 aa, synthetic construct
GYTFTNY

SEQ ID NO: 10958 - protein, 7 aa, synthetic construct
GGTFSSY

SEQ ID NO: 10959 - protein, 7 aa, synthetic construct
GFTFSNH

SEQ ID NO: 10960 - protein, 7 aa, synthetic construct
GFTFSSS

SEQ ID NO: 10961 - protein, 7 aa, synthetic construct
GGTFSSH

SEQ ID NO: 10962 - protein, 7 aa, synthetic construct
GYTFTAY

SEQ ID NO: 10963 - protein, 7 aa, synthetic construct
GYTFTSY

SEQ ID NO: 10964 - protein, 7 aa, synthetic construct
GGTFSSY

SEQ ID NO: 10965 - protein, 7 aa, synthetic construct
GGTFSNY

SEQ ID NO: 10966 - protein, 7 aa, synthetic construct
GYTFTTY

SEQ ID NO: 10967 - protein, 7 aa, synthetic construct
GYTFTGY

SEQ ID NO: 10968 - protein, 7 aa, synthetic construct
GDTFTTY

SEQ ID NO: 10969 - protein, 7 aa, synthetic construct
GGTFSSY

SEQ ID NO: 10970 - protein, 7 aa, synthetic construct
GYTFTSY

SEQ ID NO: 10971 - protein, 7 aa, synthetic construct
GYTFTSS

SEQ ID NO: 10972 - protein, 7 aa, synthetic construct
GYTFTGY

SEQ ID NO: 10973 - protein, 7 aa, synthetic construct
GGTFSSY

SEQ ID NO: 10974 - protein, 7 aa, synthetic construct
GGTFSSY

SEQ ID NO: 10975 - protein, 7 aa, synthetic construct
GYTFTSY

SEQ ID NO: 10976 - protein, 7 aa, synthetic construct
GGTFSNY

SEQ ID NO: 10977 - protein, 7 aa, synthetic construct
GGTFSSY

SEQ ID NO: 10978 - protein, 7 aa, synthetic construct
GYTFTSY

SEQ ID NO: 10979 - protein, 7 aa, synthetic construct
GYTFTAY

SEQ ID NO: 10980 - protein, 7 aa, synthetic construct
GYTFTSY

SEQ ID NO: 10981 - protein, 7 aa, synthetic construct
GFSFSDY

SEQ ID NO: 10982 - protein, 7 aa, synthetic construct
GYTFTSY

SEQ ID NO: 10983 - protein, 7 aa, synthetic construct
GYTFTSY

SEQ ID NO: 10984 - protein, 7 aa, synthetic construct
GYMFTDY

SEQ ID NO: 10985 - protein, 7 aa, synthetic construct
GYTFNSY

SEQ ID NO: 10986 - protein, 7 aa, synthetic construct
GGTFSNN

SEQ ID NO: 10987 - protein, 7 aa, synthetic construct
GYTFTEY

SEQ ID NO: 10988 - protein, 7 aa, synthetic construct
GFTFSDY

SEQ ID NO: 10989 - protein, 7 aa, synthetic construct
GYTFTTY

SEQ ID NO: 10990 - protein, 7 aa, synthetic construct
GGTSNNY

SEQ ID NO: 10991 - protein, 7 aa, synthetic construct
GYSLITH

SEQ ID NO: 10992 - protein, 7 aa, synthetic construct
GYSLITH

SEQ ID NO: 10993 - protein, 7 aa, synthetic construct
GGTFSSY

SEQ ID NO: 10994 - protein, 7 aa, synthetic construct
GYTFTSY

SEQ ID NO: 10995 - protein, 7 aa, synthetic construct
GGTFSSY

SEQ ID NO: 10996 - protein, 7 aa, synthetic construct
GFTFDDY

SEQ ID NO: 10997 - protein, 7 aa, synthetic construct
GYTFTDY

SEQ ID NO: 10998 - protein, 7 aa, synthetic construct
GGTLNNY

SEQ ID NO: 10999 - protein, 7 aa, synthetic construct
GGTFSSY

SEQ ID NO: 11000 - protein, 7 aa, synthetic construct
GFTFSNH

SEQ ID NO: 11001 - protein, 7 aa, synthetic construct
GGTFSNY

SEQ ID NO: 11002 - protein, 7 aa, synthetic construct
GYTFSDH

SEQ ID NO: 11003 - protein, 7 aa, synthetic construct
GFTFSSY

SEQ ID NO: 11004 - protein, 7 aa, synthetic construct
GFTFSSY

SEQ ID NO: 11005 - protein, 7 aa, synthetic construct
GFTFSSY

SEQ ID NO: 11006 - protein, 7 aa, synthetic construct
GFTFSDH

SEQ ID NO: 11007 - protein, 7 aa, synthetic construct
GYTFTSY

SEQ ID NO: 11008 - protein, 7 aa, synthetic construct
GYTFTGY

SEQ ID NO: 11009 - protein, 7 aa, synthetic construct
GFAFSSY

SEQ ID NO: 11010 - protein, 7 aa, synthetic construct
GFAFSSH

SEQ ID NO: 11011 - protein, 7 aa, synthetic construct
GGTFSSY

SEQ ID NO: 11012 - protein, 7 aa, synthetic construct
GYTFTDY

SEQ ID NO: 11013 - protein, 7 aa, synthetic construct
GFTFSSY

SEQ ID NO: 11014 - protein, 7 aa, synthetic construct
GGTFSSY

SEQ ID NO: 11015-11146 - skipped (132 entries)

SEQ ID NO: 11147 - protein, 5 aa, synthetic construct
NPSGG

SEQ ID NO: 11148 - protein, 6 aa, synthetic construct
DPSGGS

SEQ ID NO: 11149 - protein, 6 aa, synthetic construct
NPSGGS

SEQ ID NO: 11150 - protein, 5 aa, synthetic construct
NPSGG

SEQ ID NO: 11151 - protein, 6 aa, synthetic construct
DPNGGG

SEQ ID NO: 11152 - protein, 6 aa, synthetic construct
NPSGGS

SEQ ID NO: 11153 - protein, 6 aa, synthetic construct
NPSGGS

SEQ ID NO: 11154 - protein, 6 aa, synthetic construct
NPSGGS

SEQ ID NO: 11155 - protein, 6 aa, synthetic construct
NPHSGD

SEQ ID NO: 11156 - protein, 6 aa, synthetic construct
DPSGGS

SEQ ID NO: 11157 - protein, 6 aa, synthetic construct
DPSGGS

SEQ ID NO: 11158 - protein, 6 aa, synthetic construct
NPNSGD

SEQ ID NO: 11159 - protein, 6 aa, synthetic construct
TPSGGS

SEQ ID NO: 11160 - protein, 6 aa, synthetic construct
NPNSGN

SEQ ID NO: 11161 - protein, 6 aa, synthetic construct
SAYNGN

SEQ ID NO: 11162 - protein, 6 aa, synthetic construct
NPNSGG

SEQ ID NO: 11163 - protein, 6 aa, synthetic construct
NPNSGG

SEQ ID NO: 11164 - protein, 6 aa, synthetic construct
NPNSGG

SEQ ID NO: 11165 - protein, 6 aa, synthetic construct
NPSGGS

SEQ ID NO: 11166 - protein, 6 aa, synthetic construct
NPNSGG

SEQ ID NO: 11167 - protein, 6 aa, synthetic construct
NPNSGD

SEQ ID NO: 11168 - protein, 6 aa, synthetic construct
SVYNGN

SEQ ID NO: 11169 - protein, 6 aa, synthetic construct
NPNNGG

SEQ ID NO: 11170 - protein, 6 aa, synthetic construct
NPSGGT

SEQ ID NO: 11171 - protein, 6 aa, synthetic construct
IPLSGA

SEQ ID NO: 11172 - protein, 6 aa, synthetic construct
IPLSGA

SEQ ID NO: 11173 - protein, 6 aa, synthetic construct
WYEGSN

SEQ ID NO: 11174 - protein, 6 aa, synthetic construct
NPNRGD

SEQ ID NO: 11175 - protein, 6 aa, synthetic construct
NPNSGN

SEQ ID NO: 11176 - protein, 6 aa, synthetic construct
RSDNGE

SEQ ID NO: 11177 - protein, 6 aa, synthetic construct
IPIFGT

SEQ ID NO: 11178 - protein, 6 aa, synthetic construct
IPIFGT

SEQ ID NO: 11179 - protein, 6 aa, synthetic construct
IPIFGT

SEQ ID NO: 11180 - protein, 6 aa, synthetic construct
HSNSGG

SEQ ID NO: 11181 - protein, 6 aa, synthetic construct
NPNSGD

SEQ ID NO: 11182 - protein, 6 aa, synthetic construct
SAYNGN

SEQ ID NO: 11183 - protein, 6 aa, synthetic construct
YPSDGS

SEQ ID NO: 11184 - protein, 6 aa, synthetic construct
YPSDGS

SEQ ID NO: 11185 - protein, 6 aa, synthetic construct
NPNSGN

SEQ ID NO: 11186 - protein, 6 aa, synthetic construct
TPIFGT

SEQ ID NO: 11187 - protein, 6 aa, synthetic construct
DPSGGS

SEQ ID NO: 11188 - protein, 6 aa, synthetic construct
NPNSGD

SEQ ID NO: 11189 - protein, 6 aa, synthetic construct
SPNSGN

SEQ ID NO: 11190 - protein, 6 aa, synthetic construct
SSNGGS

SEQ ID NO: 11191 - protein, 6 aa, synthetic construct
DPTSGA

SEQ ID NO: 11192 - protein, 6 aa, synthetic construct
SPNSGN

SEQ ID NO: 11193 - protein, 6 aa, synthetic construct
NPNSGN

SEQ ID NO: 11194 - protein, 6 aa, synthetic construct
NPYDGN

SEQ ID NO: 11195 - protein, 6 aa, synthetic construct
NPSGDG

SEQ ID NO: 11196 - protein, 6 aa, synthetic construct
SAYNGD

SEQ ID NO: 11197 - protein, 5 aa, synthetic construct
GAGGG

SEQ ID NO: 11198 - protein, 6 aa, synthetic construct
NPSAGT

SEQ ID NO: 11199 - protein, 6 aa, synthetic construct
IPIFGT

SEQ ID NO: 11200 - protein, 6 aa, synthetic construct
NPNSGK

SEQ ID NO: 11201 - protein, 6 aa, synthetic construct
NPNTGD

SEQ ID NO: 11202 - protein, 6 aa, synthetic construct
DPSGGG

SEQ ID NO: 11203 - protein, 6 aa, synthetic construct
IPIFGT

SEQ ID NO: 11204 - protein, 6 aa, synthetic construct
SGGGGV

SEQ ID NO: 11205 - protein, 6 aa, synthetic construct
SGYNGN

SEQ ID NO: 11206 - protein, 6 aa, synthetic construct
NPNSGN

SEQ ID NO: 11207 - protein, 6 aa, synthetic construct
NPNSGG

SEQ ID NO: 11208 - protein, 6 aa, synthetic construct
NPSGGS

SEQ ID NO: 11209 - protein, 6 aa, synthetic construct
NPNSGN

SEQ ID NO: 11210 - protein, 6 aa, synthetic construct
NPKIGN

SEQ ID NO: 11211 - protein, 6 aa, synthetic construct
NPGTGG

SEQ ID NO: 11212 - protein, 5 aa, synthetic construct
IPSGG

SEQ ID NO: 11213 - protein, 6 aa, synthetic construct
NPDNDN

SEQ ID NO: 11214 - protein, 6 aa, synthetic construct
SYDGSD

SEQ ID NO: 11215 - protein, 6 aa, synthetic construct
STFTGN

SEQ ID NO: 11216 - protein, 6 aa, synthetic construct
STFTGN

SEQ ID NO: 11217 - protein, 6 aa, synthetic construct
SDDGIT

SEQ ID NO: 11218 - protein, 6 aa, synthetic construct
SYDGGD

SEQ ID NO: 11219 - protein, 6 aa, synthetic construct
NPNTGG

SEQ ID NO: 11220 - protein, 6 aa, synthetic construct
NPNSGN

SEQ ID NO: 11221 - protein, 6 aa, synthetic construct
SYDGSN

SEQ ID NO: 11222 - protein, 6 aa, synthetic construct
SGSGDN

SEQ ID NO: 11223 - protein, 6 aa, synthetic construct
IPIFGT

SEQ ID NO: 11224 - protein, 6 aa, synthetic construct
SPVFGS

SEQ ID NO: 11225 - protein, 6 aa, synthetic construct
SPMFGT

SEQ ID NO: 11226 - protein, 6 aa, synthetic construct
NPNSGG

SEQ ID NO: 11227 - protein, 6 aa, synthetic construct
NPNNGD

SEQ ID NO: 11228 - protein, 6 aa, synthetic construct
STYDGK

SEQ ID NO: 11229 - protein, 6 aa, synthetic construct
NPNTGA

SEQ ID NO: 11230 - protein, 6 aa, synthetic construct
NPNSGN

SEQ ID NO: 11231 - protein, 6 aa, synthetic construct
IPMLGI

SEQ ID NO: 11232 - protein, 6 aa, synthetic construct
NPSGGS

SEQ ID NO: 11233 - protein, 6 aa, synthetic construct
NPRSGN

SEQ ID NO: 11234 - protein, 6 aa, synthetic construct
NPSGGS

SEQ ID NO: 11235 - protein, 6 aa, synthetic construct
NPNSGG

SEQ ID NO: 11236 - protein, 6 aa, synthetic construct
NPNGGN

SEQ ID NO: 11237 - protein, 6 aa, synthetic construct
NPADGD

SEQ ID NO: 11238 - protein, 6 aa, synthetic construct
NPNGGT

SEQ ID NO: 11239 - protein, 6 aa, synthetic construct
NPNVGS

SEQ ID NO: 11240 - protein, 6 aa, synthetic construct
NPSDGS

SEQ ID NO: 11241 - protein, 6 aa, synthetic construct
NPNSGT

SEQ ID NO: 11242 - protein, 6 aa, synthetic construct
SPSGDA

SEQ ID NO: 11243 - protein, 6 aa, synthetic construct
GGIGDS

SEQ ID NO: 11244 - protein, 6 aa, synthetic construct
SPSDGS

SEQ ID NO: 11245 - protein, 6 aa, synthetic construct
NTYSGY

SEQ ID NO: 11246 - protein, 6 aa, synthetic construct
IPYFGT

SEQ ID NO: 11247 - protein, 6 aa, synthetic construct
IPIFGT

SEQ ID NO: 11248 - protein, 6 aa, synthetic construct
NPIYGS

SEQ ID NO: 11249 - protein, 6 aa, synthetic construct
NPHNGD

SEQ ID NO: 11250 - protein, 6 aa, synthetic construct
WQDGNV

SEQ ID NO: 11251 - protein, 6 aa, synthetic construct
NPNTGD

SEQ ID NO: 11252 - protein, 6 aa, synthetic construct
IPLFGT

SEQ ID NO: 11253 - protein, 6 aa, synthetic construct
NPSDGV

SEQ ID NO: 11254 - protein, 6 aa, synthetic construct
NPSDGV

SEQ ID NO: 11255 - protein, 6 aa, synthetic construct
NPSGGS

SEQ ID NO: 11256 - protein, 6 aa, synthetic construct
TPSGGS

SEQ ID NO: 11257 - protein, 6 aa, synthetic construct
NPNSGN

SEQ ID NO: 11258 - protein, 5 aa, synthetic construct
YSGGD

SEQ ID NO: 11259 - protein, 6 aa, synthetic construct
NPIFGT

SEQ ID NO: 11260 - protein, 6 aa, synthetic construct
DPSDGT

SEQ ID NO: 11261 - protein, 6 aa, synthetic construct
DPNSGG

SEQ ID NO: 11262 - protein, 5 aa, synthetic construct
GVNGD

SEQ ID NO: 11263 - protein, 6 aa, synthetic construct
NPNGGN

SEQ ID NO: 11264 - protein, 6 aa, synthetic construct
NPDSGN

SEQ ID NO: 11265 - protein, 6 aa, synthetic construct
SYDGHD

SEQ ID NO: 11266 - protein, 6 aa, synthetic construct
SYDGSK

SEQ ID NO: 11267 - protein, 6 aa, synthetic construct
SGGGDD

SEQ ID NO: 11268 - protein, 5 aa, synthetic construct
GTGGD

SEQ ID NO: 11269 - protein, 6 aa, synthetic construct
SPSDGS

SEQ ID NO: 11270 - protein, 6 aa, synthetic construct
NPNSGN

SEQ ID NO: 11271 - protein, 6 aa, synthetic construct
SGAGDS

SEQ ID NO: 11272 - protein, 6 aa, synthetic construct
SGNGDN

SEQ ID NO: 11273 - protein, 6 aa, synthetic construct
NPNSGG

SEQ ID NO: 11274 - protein, 6 aa, synthetic construct
NPNSGH

SEQ ID NO: 11275 - protein, 6 aa, synthetic construct
SYDGSN

SEQ ID NO: 11276 - protein, 6 aa, synthetic construct
NPSGGS

SEQ ID NO: 11277-11408 - skipped (132 entries)

SEQ ID NO: 11409 - protein, 11 aa, synthetic construct
ARDLGDPGMDV

SEQ ID NO: 11410 - protein, 11 aa, synthetic construct
ARDLGDMGMDV

SEQ ID NO: 11411 - protein, 11 aa, synthetic construct
ARDVGDRGMDV

SEQ ID NO: 11412 - protein, 11 aa, synthetic construct
ARDLGDPGMDV

SEQ ID NO: 11413 - protein, 14 aa, synthetic construct
AKDIVHDGTEYFQH

SEQ ID NO: 11414 - protein, 14 aa, synthetic construct
AKDIVHDGTEYFQH

SEQ ID NO: 11415 - protein, 12 aa, synthetic construct
AREGRDHDAFDI

SEQ ID NO: 11416 - protein, 12 aa, synthetic construct
AREGRSHDAFDI

SEQ ID NO: 11417 - protein, 17 aa, synthetic construct
ARWVGTTEYYYYYYMDV

SEQ ID NO: 11418 - protein, 16 aa, synthetic construct
ATTAYYDFWSGYSMDV

SEQ ID NO: 11419 - protein, 17 aa, synthetic construct
ARDMDNWNTGYYYYMDV

SEQ ID NO: 11420 - protein, 12 aa, synthetic construct
ARDQRGGDAWDV

SEQ ID NO: 11421 - protein, 10 aa, synthetic construct
ARDTAGHFDI

SEQ ID NO: 11422 - protein, 12 aa, synthetic construct
ARDNPDLDGMDV

SEQ ID NO: 11423 - protein, 10 aa, synthetic construct
ARDLVGHFDY

SEQ ID NO: 11424 - protein, 11 aa, synthetic construct
ARDGYSGSYSD

SEQ ID NO: 11425 - protein, 11 aa, synthetic construct
ARDGYSGSYSD

SEQ ID NO: 11426 - protein, 11 aa, synthetic construct
ARDGYSGSYSD

SEQ ID NO: 11427 - protein, 12 aa, synthetic construct
ARDQGSSGTFDY

SEQ ID NO: 11428 - protein, 10 aa, synthetic construct
ARDSTDVIDY

SEQ ID NO: 11429 - protein, 20 aa, synthetic construct
ARDGGTVTPTEEYYYYGMDV

SEQ ID NO: 11430 - protein, 8 aa, synthetic construct
ASLDDLDY

SEQ ID NO: 11431 - protein, 14 aa, synthetic construct
ARDMVRDSAEYFQH

SEQ ID NO: 11432 - protein, 11 aa, synthetic construct
ARDSSGYPIDY

SEQ ID NO: 11433 - protein, 15 aa, synthetic construct
ARGALYNWNDGWFDP

SEQ ID NO: 11434 - protein, 15 aa, synthetic construct
ARGALYNWNDGWFDP

SEQ ID NO: 11435 - protein, 13 aa, synthetic construct
ARLGTASLPYFDY

SEQ ID NO: 11436 - protein, 10 aa, synthetic construct
ARESGDGFDP

SEQ ID NO: 11437 - protein, 10 aa, synthetic construct
ARDWPNWFDP

SEQ ID NO: 11438 - protein, 11 aa, synthetic construct
AREVQLVGFDY

SEQ ID NO: 11439 - protein, 12 aa, synthetic construct
ARGSSWYLHFQH

SEQ ID NO: 11440 - protein, 12 aa, synthetic construct
ARGSSWYLHFQH

SEQ ID NO: 11441 - protein, 15 aa, synthetic construct
AKGVDRYNWNDAFDY

SEQ ID NO: 11442 - protein, 13 aa, synthetic construct
ARESSGYDSSLDY

SEQ ID NO: 11443 - protein, 13 aa, synthetic construct
TTDPRLDSSDPGY

SEQ ID NO: 11444 - protein, 7 aa, synthetic construct
ARGGMDV

SEQ ID NO: 11445 - protein, 10 aa, synthetic construct
ARDRLGDLDY

SEQ ID NO: 11446 - protein, 10 aa, synthetic construct
ARDRLGDLDY

SEQ ID NO: 11447 - protein, 13 aa, synthetic construct
ARDSIVGGYPFDY

SEQ ID NO: 11448 - protein, 16 aa, synthetic construct
AREGYSSSWHDDAFDI

SEQ ID NO: 11449 - protein, 11 aa, synthetic construct
ARDLGDYGLDS

SEQ ID NO: 11450 - protein, 18 aa, synthetic construct
ATGGSDSSGYYYEGYFQH

SEQ ID NO: 11451 - protein, 16 aa, synthetic construct
ARDKGGYYDSSGYYWY

SEQ ID NO: 11452 - protein, 15 aa, synthetic construct
ARVGDGDGYNPDFDY

SEQ ID NO: 11453 - protein, 12 aa, synthetic construct
AKDPIVATEVDY

SEQ ID NO: 11454 - protein, 9 aa, synthetic construct
ARDSGAFDI

SEQ ID NO: 11455 - protein, 11 aa, synthetic construct
AREGLLDAFDI

SEQ ID NO: 11456 - protein, 12 aa, synthetic construct
ARGGRHHDAFDI

SEQ ID NO: 11457 - protein, 11 aa, synthetic construct
ARDISNDAFDI

SEQ ID NO: 11458 - protein, 12 aa, synthetic construct
ARGSSWDDAFDI

SEQ ID NO: 11459 - protein, 12 aa, synthetic construct
AREGWNDDVFDI

SEQ ID NO: 11460 - protein, 11 aa, synthetic construct
ARDGNFGAFDI

SEQ ID NO: 11461 - protein, 20 aa, synthetic construct
ARDKSGWNYGSGSYNDAFDI

SEQ ID NO: 11462 - protein, 10 aa, synthetic construct
ARDGGLDFDY

SEQ ID NO: 11463 - protein, 13 aa, synthetic construct
AKDPAVTPDAFDI

SEQ ID NO: 11464 - protein, 11 aa, synthetic construct
AGSLYYYGMDV

SEQ ID NO: 11465 - protein, 14 aa, synthetic construct
AKEDDILPPRAFDI

SEQ ID NO: 11466 - protein, 14 aa, synthetic construct
ARVYSSGWLDAFDI

SEQ ID NO: 11467 - protein, 12 aa, synthetic construct
ASSDVSPDAFDI

SEQ ID NO: 11468 - protein, 13 aa, synthetic construct
ATPTSSSDDAFDI

SEQ ID NO: 11469 - protein, 12 aa, synthetic construct
ARASRGDDAFDI

SEQ ID NO: 11470 - protein, 22 aa, synthetic construct
ARERYEGGYSSGPGNYYYGMDV

SEQ ID NO: 11471 - protein, 11 aa, synthetic construct
ARDDDYGDYPV

SEQ ID NO: 11472 - protein, 12 aa, synthetic construct
VYDSSGYDAFDI

SEQ ID NO: 11473 - protein, 22 aa, synthetic construct
ARETPSDYYDSSGYYYNDAFDI

SEQ ID NO: 11474 - protein, 10 aa, synthetic construct
ARDLGTTFDI

SEQ ID NO: 11475 - protein, 15 aa, synthetic construct
AKDIAVAALAYGMDV

SEQ ID NO: 11476 - protein, 13 aa, synthetic construct
ARQSLYYYYGMDV

SEQ ID NO: 11477 - protein, 19 aa, synthetic construct
ARDAPLAAAGTDYYYGMDV

SEQ ID NO: 11478 - protein, 19 aa, synthetic construct
ARDAPLAAAGTDYYYGMDV

SEQ ID NO: 11479 - protein, 13 aa, synthetic construct
ARDDSSGYGGMDV

SEQ ID NO: 11480 - protein, 14 aa, synthetic construct
ASGSLVLGYYYMDV

SEQ ID NO: 11481 - protein, 14 aa, synthetic construct
ATGGGGSYYDAFDV

SEQ ID NO: 11482 - protein, 12 aa, synthetic construct
ARDIGEGYSMDV

SEQ ID NO: 11483 - protein, 19 aa, synthetic construct
AREEKYSSSWYVGVDAFDI

SEQ ID NO: 11484 - protein, 18 aa, synthetic construct
ARDQEDYYYDSSGYGMDV

SEQ ID NO: 11485 - protein, 19 aa, synthetic construct
AKGDWGIVVVPAAIGAFDI

SEQ ID NO: 11486 - protein, 19 aa, synthetic construct
ARDLGYYDSSGYRYDAFDI

SEQ ID NO: 11487 - protein, 11 aa, synthetic construct
AKDGWYYGMDV

SEQ ID NO: 11488 - protein, 14 aa, synthetic construct
ARGEAGNLDWYFDL

SEQ ID NO: 11489 - protein, 10 aa, synthetic construct
AREDVWYFDL

SEQ ID NO: 11490 - protein, 12 aa, synthetic construct
ALHLGGDWYFDL

SEQ ID NO: 11491 - protein, 13 aa, synthetic construct
ARQHGDYDWYFDL

SEQ ID NO: 11492 - protein, 7 aa, synthetic construct
ARDSGRH

SEQ ID NO: 11493 - protein, 13 aa, synthetic construct
VREEVAGANWFDP

SEQ ID NO: 11494 - protein, 13 aa, synthetic construct
AREGDYGSGEFDY

SEQ ID NO: 11495 - protein, 15 aa, synthetic construct
ARERDDYGDYGWLDY

SEQ ID NO: 11496 - protein, 19 aa, synthetic construct
ARDLYDSSGYWHYYYYMDV

SEQ ID NO: 11497 - protein, 11 aa, synthetic construct
ARFSGYDYVDY

SEQ ID NO: 11498 - protein, 10 aa, synthetic construct
ARDVGEDFDL

SEQ ID NO: 11499 - protein, 12 aa, synthetic construct
ARDFDWLFAMDV

SEQ ID NO: 11500 - protein, 10 aa, synthetic construct
AKHGDHGFYV

SEQ ID NO: 11501 - protein, 12 aa, synthetic construct
AREDSGTSWFDP

SEQ ID NO: 11502 - protein, 15 aa, synthetic construct
ARDDRGSNYYYGMDV

SEQ ID NO: 11503 - protein, 18 aa, synthetic construct
ARDSSDYYGDYRADAFDI

SEQ ID NO: 11504 - protein, 6 aa, synthetic construct
VKGLDH

SEQ ID NO: 11505 - protein, 18 aa, synthetic construct
ARMNYGDSNYYYYYGMDV

SEQ ID NO: 11506 - protein, 9 aa, synthetic construct
ARGAVGFDY

SEQ ID NO: 11507 - protein, 10 aa, synthetic construct
TTDDFLSFGY

SEQ ID NO: 11508 - protein, 15 aa, synthetic construct
ARSISGSYVLDAFDI

SEQ ID NO: 11509 - protein, 16 aa, synthetic construct
ARDWGYGDYADDAFDI

SEQ ID NO: 11510 - protein, 9 aa, synthetic construct
AADWRGFDY

SEQ ID NO: 11511 - protein, 13 aa, synthetic construct
AREGDYLGYPIDC

SEQ ID NO: 11512 - protein, 10 aa, synthetic construct
ARDGNSGYVF

SEQ ID NO: 11513 - protein, 15 aa, synthetic construct
ARTAEAVAGLPAFDY

SEQ ID NO: 11514 - protein, 11 aa, synthetic construct
ARVTLYGDYDY

SEQ ID NO: 11515 - protein, 11 aa, synthetic construct
AREYYGEGFDY

SEQ ID NO: 11516 - protein, 11 aa, synthetic construct
AREYYGEGFDY

SEQ ID NO: 11517 - protein, 11 aa, synthetic construct
ARDLGDTAMDG

SEQ ID NO: 11518 - protein, 11 aa, synthetic construct
ARDGGLASFDY

SEQ ID NO: 11519 - protein, 14 aa, synthetic construct
ARGGGWAMTDAFDI

SEQ ID NO: 11520 - protein, 18 aa, synthetic construct
TRKEYYYDSSGYLRLFDY

SEQ ID NO: 11521 - protein, 16 aa, synthetic construct
ARDISGYDYYYYGMDV

SEQ ID NO: 11522 - protein, 17 aa, synthetic construct
ARSDYDFWSGLGGYFDY

SEQ ID NO: 11523 - protein, 15 aa, synthetic construct
ARDSAEWELGGSFDY

SEQ ID NO: 11524 - protein, 17 aa, synthetic construct
AREGLVFSGRGHWYFDL

SEQ ID NO: 11525 - protein, 11 aa, synthetic construct
ARDYEDADFDG

SEQ ID NO: 11526 - protein, 10 aa, synthetic construct
ARDSTSGVDY

SEQ ID NO: 11527 - protein, 18 aa, synthetic construct
ARGEQQLEGFYYYYGMDV

SEQ ID NO: 11528 - protein, 12 aa, synthetic construct
ASDYGDYGTYDY

SEQ ID NO: 11529 - protein, 18 aa, synthetic construct
AREPLAYCGGDCPGGFDY

SEQ ID NO: 11530 - protein, 12 aa, synthetic construct
ARHEDTAIFLDY

SEQ ID NO: 11531 - protein, 14 aa, synthetic construct
ARDGYDAWSYGMDV

SEQ ID NO: 11532 - protein, 10 aa, synthetic construct
ARDGVTGTDY

SEQ ID NO: 11533 - protein, 15 aa, synthetic construct
AREPTTVTDDWYFDL

SEQ ID NO: 11534 - protein, 11 aa, synthetic construct
ARDRAPEYFDL

SEQ ID NO: 11535 - protein, 14 aa, synthetic construct
ARDDYGDYGGGMDV

SEQ ID NO: 11536 - protein, 15 aa, synthetic construct
AKDTSPRYGDGFFDY

SEQ ID NO: 11537 - protein, 13 aa, synthetic construct
ARESGFSAEYFQH

SEQ ID NO: 11538 - protein, 15 aa, synthetic construct
ARATGLYCSGSCFDY

SEQ ID NO: 11539 - skipped

SEQ ID NO: 11540 - protein, 8 aa, synthetic construct
GGTFSSYA

SEQ ID NO: 11541 - protein, 8 aa, synthetic construct
GGTFSNYA

SEQ ID NO: 11542 - protein, 8 aa, synthetic construct
GGTFSNYA

SEQ ID NO: 11543 - protein, 8 aa, synthetic construct
GGTFSSYA

SEQ ID NO: 11544 - protein, 8 aa, synthetic construct
GSTFSGYY

SEQ ID NO: 11545 - protein, 8 aa, synthetic construct
GYTFTSYY

SEQ ID NO: 11546 - protein, 8 aa, synthetic construct
GGTFSSYA

SEQ ID NO: 11547 - protein, 8 aa, synthetic construct
GFTFTDYG

SEQ ID NO: 11548 - protein, 8 aa, synthetic construct
GYTFTGYY

SEQ ID NO: 11549 - protein, 8 aa, synthetic construct
GYTFTDYY

SEQ ID NO: 11550 - protein, 8 aa, synthetic construct
GYTFTSHY

SEQ ID NO: 11551 - protein, 8 aa, synthetic construct
GGTFSSYA

SEQ ID NO: 11552 - protein, 8 aa, synthetic construct
GGTFSNYA

SEQ ID NO: 11553 - protein, 8 aa, synthetic construct
GGTFRNDV

SEQ ID NO: 11554 - protein, 8 aa, synthetic construct
GGTFSSYA

SEQ ID NO: 11555 - protein, 8 aa, synthetic construct
GGTFSSYA

SEQ ID NO: 11556 - protein, 8 aa, synthetic construct
GGTFSSYA

SEQ ID NO: 11557 - protein, 8 aa, synthetic construct
GGTFSSYA

SEQ ID NO: 11558 - protein, 8 aa, synthetic construct
GNTLSSHA

SEQ ID NO: 11559 - protein, 8 aa, synthetic construct
GGTLSSYA

SEQ ID NO: 11560 - protein, 8 aa, synthetic construct
GYIFTSYD

SEQ ID NO: 11561 - protein, 8 aa, synthetic construct
GGTFSSYA

SEQ ID NO: 11562 - protein, 8 aa, synthetic construct
GHTFTSYY

SEQ ID NO: 11563 - protein, 8 aa, synthetic construct
GYTFITSY

SEQ ID NO: 11564 - protein, 8 aa, synthetic construct
GYTFTSYD

SEQ ID NO: 11565 - protein, 8 aa, synthetic construct
GYTFTSYD

SEQ ID NO: 11566 - protein, 8 aa, synthetic construct
GFTVGSWY

SEQ ID NO: 11567 - protein, 8 aa, synthetic construct
GYTFTGYY

SEQ ID NO: 11568 - protein, 8 aa, synthetic construct
GYTFTNYY

SEQ ID NO: 11569 - protein, 8 aa, synthetic construct
GYSFTDNY

SEQ ID NO: 11570 - protein, 8 aa, synthetic construct
GYTFSDHH

SEQ ID NO: 11571 - protein, 8 aa, synthetic construct
GYTFSDHH

SEQ ID NO: 11572 - protein, 8 aa, synthetic construct
GGTFSSYA

SEQ ID NO: 11573 - protein, 8 aa, synthetic construct
GYTFTDYY

SEQ ID NO: 11574 - protein, 8 aa, synthetic construct
GGTFSSYG

SEQ ID NO: 11575 - protein, 8 aa, synthetic construct
GGTFGNYG

SEQ ID NO: 11576 - protein, 8 aa, synthetic construct
GGTFSRYG

SEQ ID NO: 11577 - protein, 8 aa, synthetic construct
GGTFSRYG

SEQ ID NO: 11578 - protein, 8 aa, synthetic construct
GGTFSSYA

SEQ ID NO: 11579 - protein, 8 aa, synthetic construct
GYTFTSYD

SEQ ID NO: 11580 - protein, 8 aa, synthetic construct
GGTFSNYA

SEQ ID NO: 11581 - protein, 8 aa, synthetic construct
GYTFTGYY

SEQ ID NO: 11582 - protein, 8 aa, synthetic construct
GGTFSSYA

SEQ ID NO: 11583 - protein, 8 aa, synthetic construct
GFSLSSYE

SEQ ID NO: 11584 - protein, 8 aa, synthetic construct
GYTFTSYG

SEQ ID NO: 11585 - protein, 8 aa, synthetic construct
GGTFSSYA

SEQ ID NO: 11586 - protein, 8 aa, synthetic construct
GVTISNYA

SEQ ID NO: 11587 - protein, 8 aa, synthetic construct
GGTFSRYG

SEQ ID NO: 11588 - protein, 8 aa, synthetic construct
GGTFSSYA

SEQ ID NO: 11589 - protein, 8 aa, synthetic construct
GYILTGHY

SEQ ID NO: 11590 - protein, 8 aa, synthetic construct
GFTFSNHY

SEQ ID NO: 11591 - protein, 8 aa, synthetic construct
GGTFSSYA

SEQ ID NO: 11592 - protein, 8 aa, synthetic construct
GYSFTTYA

SEQ ID NO: 11593 - protein, 8 aa, synthetic construct
GYAFTGYY

SEQ ID NO: 11594 - protein, 8 aa, synthetic construct
GYTFTTYY

SEQ ID NO: 11595 - protein, 8 aa, synthetic construct
GGTLSSYA

SEQ ID NO: 11596 - protein, 8 aa, synthetic construct
GGTFGSSA

SEQ ID NO: 11597 - protein, 8 aa, synthetic construct
GFTFDDYA

SEQ ID NO: 11598 - protein, 8 aa, synthetic construct
GGTFSSYA

SEQ ID NO: 11599 - protein, 8 aa, synthetic construct
GGTQNIYA

SEQ ID NO: 11600 - protein, 8 aa, synthetic construct
GGTFSSYA

SEQ ID NO: 11601 - protein, 8 aa, synthetic construct
GIPFTSDD

SEQ ID NO: 11602 - protein, 8 aa, synthetic construct
GGTFSNYA

SEQ ID NO: 11603 - protein, 8 aa, synthetic construct
GDTFSDHA

SEQ ID NO: 11604 - protein, 8 aa, synthetic construct
GYTFTSYD

SEQ ID NO: 11605 - protein, 8 aa, synthetic construct
GGTFSSYA

SEQ ID NO: 11606 - protein, 8 aa, synthetic construct
GYTFTAYY

SEQ ID NO: 11607 - protein, 8 aa, synthetic construct
GFTFSSYA

SEQ ID NO: 11608 - protein, 8 aa, synthetic construct
GYTFTDYY

SEQ ID NO: 11609 - protein, 8 aa, synthetic construct
GYTFTDYY

SEQ ID NO: 11610 - protein, 8 aa, synthetic construct
GFTFSSYA

SEQ ID NO: 11611 - protein, 8 aa, synthetic construct
GFTFSSYA

SEQ ID NO: 11612 - protein, 8 aa, synthetic construct
GYTFTNYY

SEQ ID NO: 11613 - protein, 8 aa, synthetic construct
GGTFSSYA

SEQ ID NO: 11614 - protein, 8 aa, synthetic construct
GFTFSNHY

SEQ ID NO: 11615 - protein, 8 aa, synthetic construct
GFTFSSSA

SEQ ID NO: 11616 - protein, 8 aa, synthetic construct
GGTFSSHA

SEQ ID NO: 11617 - protein, 8 aa, synthetic construct
GYTFTAYY

SEQ ID NO: 11618 - protein, 8 aa, synthetic construct
GYTFTSYD

SEQ ID NO: 11619 - protein, 8 aa, synthetic construct
GGTFSSYG

SEQ ID NO: 11620 - protein, 8 aa, synthetic construct
GGTFSNYG

SEQ ID NO: 11621 - protein, 8 aa, synthetic construct
GYTFTTYG

SEQ ID NO: 11622 - protein, 8 aa, synthetic construct
GYTFTGYY

SEQ ID NO: 11623 - protein, 8 aa, synthetic construct
GDTFTTYY

SEQ ID NO: 11624 - protein, 8 aa, synthetic construct
GGTFSSYG

SEQ ID NO: 11625 - protein, 8 aa, synthetic construct
GYTFTSYA

SEQ ID NO: 11626 - protein, 8 aa, synthetic construct
GYTFTSSY

SEQ ID NO: 11627 - protein, 8 aa, synthetic construct
GYTFTGYY

SEQ ID NO: 11628 - protein, 8 aa, synthetic construct
GGTFSSYA

SEQ ID NO: 11629 - protein, 8 aa, synthetic construct
GGTFSSYA

SEQ ID NO: 11630 - protein, 8 aa, synthetic construct
GYTFTSYY

SEQ ID NO: 11631 - protein, 8 aa, synthetic construct
GGTFSNYA

SEQ ID NO: 11632 - protein, 8 aa, synthetic construct
GGTFSSYA

SEQ ID NO: 11633 - protein, 8 aa, synthetic construct
GYTFTSYY

SEQ ID NO: 11634 - protein, 8 aa, synthetic construct
GYTFTAYY

SEQ ID NO: 11635 - protein, 8 aa, synthetic construct
GYTFTSYD

SEQ ID NO: 11636 - protein, 8 aa, synthetic construct
GFSFSDYG

SEQ ID NO: 11637 - protein, 8 aa, synthetic construct
GYTFTSYD

SEQ ID NO: 11638 - protein, 8 aa, synthetic construct
GYTFTSYG

SEQ ID NO: 11639 - protein, 8 aa, synthetic construct
GYMFTDYY

SEQ ID NO: 11640 - protein, 8 aa, synthetic construct
GYTFNSYG

SEQ ID NO: 11641 - protein, 8 aa, synthetic construct
GGTFSNND

SEQ ID NO: 11642 - protein, 8 aa, synthetic construct
GYTFTEYA

SEQ ID NO: 11643 - protein, 8 aa, synthetic construct
GFTFSDYS

SEQ ID NO: 11644 - protein, 8 aa, synthetic construct
GYTFTTYY

SEQ ID NO: 11645 - protein, 8 aa, synthetic construct
GGTSNNYA

SEQ ID NO: 11646 - protein, 8 aa, synthetic construct
GYSLITHW

SEQ ID NO: 11647 - protein, 8 aa, synthetic construct
GYSLITHW

SEQ ID NO: 11648 - protein, 8 aa, synthetic construct
GGTFSSYA

SEQ ID NO: 11649 - protein, 8 aa, synthetic construct
GYTFTSYY

SEQ ID NO: 11650 - protein, 8 aa, synthetic construct
GGTFSSYA

SEQ ID NO: 11651 - protein, 8 aa, synthetic construct
GFTFDDYG

SEQ ID NO: 11652 - protein, 8 aa, synthetic construct
GYTFTDYY

SEQ ID NO: 11653 - protein, 8 aa, synthetic construct
GGTLNNYA

SEQ ID NO: 11654 - protein, 8 aa, synthetic construct
GGTFSSYA

SEQ ID NO: 11655 - protein, 8 aa, synthetic construct
GFTFSNHY

SEQ ID NO: 11656 - protein, 8 aa, synthetic construct
GGTFSNYA

SEQ ID NO: 11657 - protein, 8 aa, synthetic construct
GYTFSDHH

SEQ ID NO: 11658 - protein, 8 aa, synthetic construct
GFTFSSYA

SEQ ID NO: 11659 - protein, 8 aa, synthetic construct
GFTFSSYW

SEQ ID NO: 11660 - protein, 8 aa, synthetic construct
GFTFSSYW

SEQ ID NO: 11661 - protein, 8 aa, synthetic construct
GFTFSDHY

SEQ ID NO: 11662 - protein, 8 aa, synthetic construct
GYTFTSYY

SEQ ID NO: 11663 - protein, 8 aa, synthetic construct
GYTFTGYY

SEQ ID NO: 11664 - protein, 8 aa, synthetic construct
GFAFSSYV

SEQ ID NO: 11665 - protein, 8 aa, synthetic construct
GFAFSSHW

SEQ ID NO: 11666 - protein, 8 aa, synthetic construct
GGTFSSYA

SEQ ID NO: 11667 - protein, 8 aa, synthetic construct
GYTFTDYY

SEQ ID NO: 11668 - protein, 8 aa, synthetic construct
GFTFSSYW

SEQ ID NO: 11669 - protein, 8 aa, synthetic construct
GGTFSSYA

SEQ ID NO: 11670-11801 - skipped (132 entries)

SEQ ID NO: 11802 - protein, 7 aa, synthetic construct
INPSGGT

SEQ ID NO: 11803 - protein, 8 aa, synthetic construct
IDPSGGST

SEQ ID NO: 11804 - protein, 8 aa, synthetic construct
INPSGGST

SEQ ID NO: 11805 - protein, 7 aa, synthetic construct
INPSGGT

SEQ ID NO: 11806 - protein, 8 aa, synthetic construct
IDPNGGGT

SEQ ID NO: 11807 - protein, 8 aa, synthetic construct
INPSGGST

SEQ ID NO: 11808 - protein, 8 aa, synthetic construct
INPSGGST

SEQ ID NO: 11809 - protein, 8 aa, synthetic construct
INPSGGST

SEQ ID NO: 11810 - protein, 8 aa, synthetic construct
MNPHSGDT

SEQ ID NO: 11811 - protein, 8 aa, synthetic construct
IDPSGGST

SEQ ID NO: 11812 - protein, 8 aa, synthetic construct
IDPSGGST

SEQ ID NO: 11813 - protein, 8 aa, synthetic construct
VNPNSGDT

SEQ ID NO: 11814 - protein, 8 aa, synthetic construct
ITPSGGST

SEQ ID NO: 11815 - protein, 8 aa, synthetic construct
MNPNSGNT

SEQ ID NO: 11816 - protein, 8 aa, synthetic construct
ISAYNGNT

SEQ ID NO: 11817 - protein, 8 aa, synthetic construct
INPNSGGT

SEQ ID NO: 11818 - protein, 8 aa, synthetic construct
INPNSGGT

SEQ ID NO: 11819 - protein, 8 aa, synthetic construct
INPNSGGT

SEQ ID NO: 11820 - protein, 8 aa, synthetic construct
INPSGGST

SEQ ID NO: 11821 - protein, 8 aa, synthetic construct
INPNSGGT

SEQ ID NO: 11822 - protein, 8 aa, synthetic construct
INPNSGDT

SEQ ID NO: 11823 - protein, 8 aa, synthetic construct
ISVYNGNT

SEQ ID NO: 11824 - protein, 8 aa, synthetic construct
INPNNGGT

SEQ ID NO: 11825 - protein, 8 aa, synthetic construct
INPSGGTT

SEQ ID NO: 11826 - protein, 8 aa, synthetic construct
IIPLSGAP

SEQ ID NO: 11827 - protein, 8 aa, synthetic construct
IIPLSGAP

SEQ ID NO: 11828 - protein, 8 aa, synthetic construct
IWYEGSNK

SEQ ID NO: 11829 - protein, 8 aa, synthetic construct
INPNRGDT

SEQ ID NO: 11830 - protein, 8 aa, synthetic construct
MNPNSGNT

SEQ ID NO: 11831 - protein, 8 aa, synthetic construct
IRSDNGET

SEQ ID NO: 11832 - protein, 8 aa, synthetic construct
IIPIFGTA

SEQ ID NO: 11833 - protein, 8 aa, synthetic construct
IIPIFGTA

SEQ ID NO: 11834 - protein, 8 aa, synthetic construct
IIPIFGTT

SEQ ID NO: 11835 - protein, 8 aa, synthetic construct
IHSNSGGT

SEQ ID NO: 11836 - protein, 8 aa, synthetic construct
INPNSGDT

SEQ ID NO: 11837 - protein, 8 aa, synthetic construct
ISAYNGNT

SEQ ID NO: 11838 - protein, 8 aa, synthetic construct
SYPSDGST

SEQ ID NO: 11839 - protein, 8 aa, synthetic construct
SYPSDGST

SEQ ID NO: 11840 - protein, 8 aa, synthetic construct
MNPNSGNT

SEQ ID NO: 11841 - protein, 8 aa, synthetic construct
ITPIFGTT

SEQ ID NO: 11842 - protein, 8 aa, synthetic construct
IDPSGGST

SEQ ID NO: 11843 - protein, 8 aa, synthetic construct
MNPNSGDT

SEQ ID NO: 11844 - protein, 8 aa, synthetic construct
MSPNSGNT

SEQ ID NO: 11845 - protein, 8 aa, synthetic construct
ISSNGGST

SEQ ID NO: 11846 - protein, 8 aa, synthetic construct
IDPTSGAT

SEQ ID NO: 11847 - protein, 8 aa, synthetic construct
MSPNSGNT

SEQ ID NO: 11848 - protein, 8 aa, synthetic construct
MNPNSGNT

SEQ ID NO: 11849 - protein, 8 aa, synthetic construct
MNPYDGNT

SEQ ID NO: 11850 - protein, 8 aa, synthetic construct
INPSGDGT

SEQ ID NO: 11851 - protein, 8 aa, synthetic construct
ISAYNGDT

SEQ ID NO: 11852 - protein, 7 aa, synthetic construct
IGAGGGT

SEQ ID NO: 11853 - protein, 8 aa, synthetic construct
INPSAGTT

SEQ ID NO: 11854 - protein, 8 aa, synthetic construct
IIPIFGTA

SEQ ID NO: 11855 - protein, 8 aa, synthetic construct
MNPNSGKT

SEQ ID NO: 11856 - protein, 8 aa, synthetic construct
MNPNTGDT

SEQ ID NO: 11857 - protein, 8 aa, synthetic construct
IDPSGGGT

SEQ ID NO: 11858 - protein, 8 aa, synthetic construct
IIPIFGTA

SEQ ID NO: 11859 - protein, 8 aa, synthetic construct
ISGGGGVT

SEQ ID NO: 11860 - protein, 8 aa, synthetic construct
ISGYNGNT

SEQ ID NO: 11861 - protein, 8 aa, synthetic construct
VNPNSGNT

SEQ ID NO: 11862 - protein, 8 aa, synthetic construct
INPNSGGT

SEQ ID NO: 11863 - protein, 8 aa, synthetic construct
INPSGGST

SEQ ID NO: 11864 - protein, 8 aa, synthetic construct
MNPNSGNT

SEQ ID NO: 11865 - protein, 8 aa, synthetic construct
MNPKIGNT

SEQ ID NO: 11866 - protein, 8 aa, synthetic construct
INPGTGGT

SEQ ID NO: 11867 - protein, 7 aa, synthetic construct
IIPSGGT

SEQ ID NO: 11868 - protein, 8 aa, synthetic construct
INPDNDNA

SEQ ID NO: 11869 - protein, 8 aa, synthetic construct
ISYDGSDQ

SEQ ID NO: 11870 - protein, 8 aa, synthetic construct
ISTFTGNT

SEQ ID NO: 11871 - protein, 8 aa, synthetic construct
ISTFTGNT

SEQ ID NO: 11872 - protein, 8 aa, synthetic construct
ISDDGITK

SEQ ID NO: 11873 - protein, 8 aa, synthetic construct
ISYDGGDK

SEQ ID NO: 11874 - protein, 8 aa, synthetic construct
INPNTGGT

SEQ ID NO: 11875 - protein, 8 aa, synthetic construct
INPNSGNT

SEQ ID NO: 11876 - protein, 8 aa, synthetic construct
ISYDGSNK

SEQ ID NO: 11877 - protein, 8 aa, synthetic construct
ISGSGDNA

SEQ ID NO: 11878 - protein, 8 aa, synthetic construct
IIPIFGTA

SEQ ID NO: 11879 - protein, 8 aa, synthetic construct
ISPVFGST

SEQ ID NO: 11880 - protein, 8 aa, synthetic construct
ISPMFGTA

SEQ ID NO: 11881 - protein, 8 aa, synthetic construct
INPNSGGT

SEQ ID NO: 11882 - protein, 8 aa, synthetic construct
INPNNGDT

SEQ ID NO: 11883 - protein, 8 aa, synthetic construct
ISTYDGKT

SEQ ID NO: 11884 - protein, 8 aa, synthetic construct
INPNTGAT

SEQ ID NO: 11885 - protein, 8 aa, synthetic construct
INPNSGNT

SEQ ID NO: 11886 - protein, 8 aa, synthetic construct
IIPMLGIA

SEQ ID NO: 11887 - protein, 8 aa, synthetic construct
INPSGGST

SEQ ID NO: 11888 - protein, 8 aa, synthetic construct
MNPRSGNT

SEQ ID NO: 11889 - protein, 8 aa, synthetic construct
INPSGGST

SEQ ID NO: 11890 - protein, 8 aa, synthetic construct
INPNSGGT

SEQ ID NO: 11891 - protein, 8 aa, synthetic construct
INPNGGNT

SEQ ID NO: 11892 - protein, 8 aa, synthetic construct
INPADGDT

SEQ ID NO: 11893 - protein, 8 aa, synthetic construct
INPNGGTT

SEQ ID NO: 11894 - protein, 8 aa, synthetic construct
INPNVGSA

SEQ ID NO: 11895 - protein, 8 aa, synthetic construct
INPSDGST

SEQ ID NO: 11896 - protein, 8 aa, synthetic construct
MNPNSGTT

SEQ ID NO: 11897 - protein, 8 aa, synthetic construct
ISPSGDAT

SEQ ID NO: 11898 - protein, 8 aa, synthetic construct
IGGIGDST

SEQ ID NO: 11899 - protein, 8 aa, synthetic construct
ISPSDGST

SEQ ID NO: 11900 - protein, 8 aa, synthetic construct
INTYSGYT

SEQ ID NO: 11901 - protein, 8 aa, synthetic construct
IIPYFGTA

SEQ ID NO: 11902 - protein, 8 aa, synthetic construct
IIPIFGTA

SEQ ID NO: 11903 - protein, 8 aa, synthetic construct
INPIYGSA

SEQ ID NO: 11904 - protein, 8 aa, synthetic construct
MNPHNGDT

SEQ ID NO: 11905 - protein, 8 aa, synthetic construct
IWQDGNVK

SEQ ID NO: 11906 - protein, 8 aa, synthetic construct
INPNTGDT

SEQ ID NO: 11907 - protein, 8 aa, synthetic construct
IIPLFGTT

SEQ ID NO: 11908 - protein, 8 aa, synthetic construct
INPSDGVT

SEQ ID NO: 11909 - protein, 8 aa, synthetic construct
INPSDGVT

SEQ ID NO: 11910 - protein, 8 aa, synthetic construct
INPSGGST

SEQ ID NO: 11911 - protein, 8 aa, synthetic construct
ITPSGGST

SEQ ID NO: 11912 - protein, 8 aa, synthetic construct
MNPNSGNT

SEQ ID NO: 11913 - protein, 7 aa, synthetic construct
IYSGGDT

SEQ ID NO: 11914 - protein, 8 aa, synthetic construct
INPIFGTS

SEQ ID NO: 11915 - protein, 8 aa, synthetic construct
IDPSDGTI

SEQ ID NO: 11916 - protein, 8 aa, synthetic construct
IDPNSGGT

SEQ ID NO: 11917 - protein, 7 aa, synthetic construct
IGVNGDT

SEQ ID NO: 11918 - protein, 8 aa, synthetic construct
INPNGGNT

SEQ ID NO: 11919 - protein, 8 aa, synthetic construct
MNPDSGNT

SEQ ID NO: 11920 - protein, 8 aa, synthetic construct
ISYDGHDQ

SEQ ID NO: 11921 - protein, 8 aa, synthetic construct
ISYDGSKE

SEQ ID NO: 11922 - protein, 8 aa, synthetic construct
ISGGGDDT

SEQ ID NO: 11923 - protein, 7 aa, synthetic construct
IGTGGDT

SEQ ID NO: 11924 - protein, 8 aa, synthetic construct
ISPSDGST

SEQ ID NO: 11925 - protein, 8 aa, synthetic construct
MNPNSGNT

SEQ ID NO: 11926 - protein, 8 aa, synthetic construct
ISGAGDST

SEQ ID NO: 11927 - protein, 8 aa, synthetic construct
ISGNGDNS

SEQ ID NO: 11928 - protein, 8 aa, synthetic construct
INPNSGGT

SEQ ID NO: 11929 - protein, 8 aa, synthetic construct
MNPNSGHT

SEQ ID NO: 11930 - protein, 8 aa, synthetic construct
TSYDGSNK

SEQ ID NO: 11931 - protein, 8 aa, synthetic construct
INPSGGST

SEQ ID NO: 11932-12193 - skipped (262 entries)

SEQ ID NO: 12194 - protein, 11 aa, synthetic construct
RASQDISNYLN

SEQ ID NO: 12195 - protein, 11 aa, synthetic construct
RASQSISSYLN

SEQ ID NO: 12196 - protein, 11 aa, synthetic construct
QASQDISNYLN

SEQ ID NO: 12197 - protein, 11 aa, synthetic construct
RASQDISNYLN

SEQ ID NO: 12198 - protein, 11 aa, synthetic construct
RASQNVNTWLA

SEQ ID NO: 12199 - protein, 11 aa, synthetic construct
RASQSISDWLA

SEQ ID NO: 12200 - protein, 17 aa, synthetic construct
KSSQSVLSSSYNKNYLA

SEQ ID NO: 12201 - protein, 17 aa, synthetic construct
KSSQSVLSSSYNKNYLA

SEQ ID NO: 12202 - protein, 11 aa, synthetic construct
RASQAIRDDLG

SEQ ID NO: 12203 - protein, 11 aa, synthetic construct
RASQGVGNDLA

SEQ ID NO: 12204 - protein, 11 aa, synthetic construct
RASQIIGTNLA

SEQ ID NO: 12205 - protein, 11 aa, synthetic construct
RASQSISTWLA

SEQ ID NO: 12206 - protein, 17 aa, synthetic construct
KSSQSVLSSSNNKNYLA

SEQ ID NO: 12207 - protein, 17 aa, synthetic construct
KSSQSVLSSSYNKNYLA

SEQ ID NO: 12208 - protein, 17 aa, synthetic construct
KSSQSVLSSSYNKNYLA

SEQ ID NO: 12209 - protein, 17 aa, synthetic construct
KSSQSVLSSSYNKNYLA

SEQ ID NO: 12210 - protein, 17 aa, synthetic construct
KSSQSVLSSSYNKNYLA

SEQ ID NO: 12211 - protein, 17 aa, synthetic construct
KSSQSVLSSSYNKNYLA

SEQ ID NO: 12212 - protein, 17 aa, synthetic construct
KSSQSVLSSSYNKNYLA

SEQ ID NO: 12213 - protein, 11 aa, synthetic construct
QASQDIRNYLN

SEQ ID NO: 12214 - protein, 11 aa, synthetic construct
QASQDISNYLN

SEQ ID NO: 12215 - protein, 11 aa, synthetic construct
QASQSISTWLA

SEQ ID NO: 12216 - protein, 11 aa, synthetic construct
RASEDISTYLA

SEQ ID NO: 12217 - protein, 11 aa, synthetic construct
RASHHISDFLN

SEQ ID NO: 12218 - protein, 11 aa, synthetic construct
RASQDIGDYLA

SEQ ID NO: 12219 - protein, 11 aa, synthetic construct
RASQDIGDYLA

SEQ ID NO: 12220 - protein, 11 aa, synthetic construct
RASQDIRSYLA

SEQ ID NO: 12221 - protein, 11 aa, synthetic construct
RASQDISNNLN

SEQ ID NO: 12222 - protein, 11 aa, synthetic construct
RASQDISNWLA

SEQ ID NO: 12223 - protein, 11 aa, synthetic construct
RASQGIANYLA

SEQ ID NO: 12224 - protein, 11 aa, synthetic construct
RASQGIASYLA

SEQ ID NO: 12225 - protein, 11 aa, synthetic construct
RASQGIASYLA

SEQ ID NO: 12226 - protein, 11 aa, synthetic construct
RASQGISNYLA

SEQ ID NO: 12227 - protein, 11 aa, synthetic construct
RASQGISNYLA

SEQ ID NO: 12228 - protein, 11 aa, synthetic construct
RASQSIGRWLA

SEQ ID NO: 12229 - protein, 11 aa, synthetic construct
RASQSINSWLA

SEQ ID NO: 12230 - protein, 11 aa, synthetic construct
RASQSISSWLA

SEQ ID NO: 12231 - protein, 11 aa, synthetic construct
RASQSISSWLA

SEQ ID NO: 12232 - protein, 11 aa, synthetic construct
RASQSISSYLN

SEQ ID NO: 12233 - protein, 11 aa, synthetic construct
RASQSISSYLN

SEQ ID NO: 12234 - protein, 11 aa, synthetic construct
RASQTIRSYLN

SEQ ID NO: 12235 - protein, 11 aa, synthetic construct
RASQTISNWLA

SEQ ID NO: 12236 - protein, 11 aa, synthetic construct
RASQYIGSYLN

SEQ ID NO: 12237 - protein, 16 aa, synthetic construct
RSSQSLLHSNGYNYLD

SEQ ID NO: 12238 - protein, 16 aa, synthetic construct
RSSQSLLHSNGYNYLD

SEQ ID NO: 12239 - protein, 17 aa, synthetic construct
KSSQSVLSSSYNKNYLA

SEQ ID NO: 12240 - protein, 17 aa, synthetic construct
KSSQSVSSSSYNKNYLA

SEQ ID NO: 12241 - protein, 17 aa, synthetic construct
KSTQNVLSSSNNNSYLA

SEQ ID NO: 12242 - protein, 11 aa, synthetic construct
QASQDIGNYLN

SEQ ID NO: 12243 - protein, 11 aa, synthetic construct
QASQDISNYLN

SEQ ID NO: 12244 - protein, 11 aa, synthetic construct
QASQDISTWLA

SEQ ID NO: 12245 - protein, 11 aa, synthetic construct
RASQNINNYLN

SEQ ID NO: 12246 - protein, 11 aa, synthetic construct
RASQNINTWLA

SEQ ID NO: 12247 - protein, 11 aa, synthetic construct
RASQRIGNYLN

SEQ ID NO: 12248 - protein, 11 aa, synthetic construct
RASQSISTYLN

SEQ ID NO: 12249 - protein, 11 aa, synthetic construct
RASQSVGSYLA

SEQ ID NO: 12250 - protein, 11 aa, synthetic construct
RASRSVSTYLA

SEQ ID NO: 12251 - protein, 16 aa, synthetic construct
RSSQSLLHSNGYNYLD

SEQ ID NO: 12252 - protein, 17 aa, synthetic construct
KSSQSVLSSSYNKNFLA

SEQ ID NO: 12253 - protein, 17 aa, synthetic construct
KSSQSVLSSSYNKNFLA

SEQ ID NO: 12254 - protein, 17 aa, synthetic construct
KSSQSVLSSSYNKNYLA

SEQ ID NO: 12255 - protein, 17 aa, synthetic construct
KSSQSVLSSSYNKNYLA

SEQ ID NO: 12256 - protein, 17 aa, synthetic construct
KSSQSVLSTSYNKNYLA

SEQ ID NO: 12257 - protein, 17 aa, synthetic construct
KSSQSVLSTSYNRNFLA

SEQ ID NO: 12258 - protein, 17 aa, synthetic construct
KSSQSVLYSSNNKNYLA

SEQ ID NO: 12259 - protein, 11 aa, synthetic construct
QASQDISNYLN

SEQ ID NO: 12260 - protein, 11 aa, synthetic construct
QASQDISNYLN

SEQ ID NO: 12261 - protein, 11 aa, synthetic construct
RASQGIRNDLG

SEQ ID NO: 12262 - protein, 11 aa, synthetic construct
RASQGISNYLA

SEQ ID NO: 12263 - protein, 11 aa, synthetic construct
RASQGISNYLA

SEQ ID NO: 12264 - protein, 11 aa, synthetic construct
RASQSINRWLA

SEQ ID NO: 12265 - protein, 11 aa, synthetic construct
RASQSINTWLA

SEQ ID NO: 12266 - protein, 11 aa, synthetic construct
RASQSIRTWLA

SEQ ID NO: 12267 - protein, 11 aa, synthetic construct
RASQSIRTYLN

SEQ ID NO: 12268 - protein, 11 aa, synthetic construct
RASQSISTYLN

SEQ ID NO: 12269 - protein, 11 aa, synthetic construct
RASQSITTYLN

SEQ ID NO: 12270 - protein, 16 aa, synthetic construct
RSSQSLLHSNGYNYLD

SEQ ID NO: 12271 - protein, 16 aa, synthetic construct
RSSQSLLHSNGYNYLD

SEQ ID NO: 12272 - protein, 16 aa, synthetic construct
RSSQSLLHSNGYNYLD

SEQ ID NO: 12273 - protein, 17 aa, synthetic construct
KSSQTVFSTSYNKNYLA

SEQ ID NO: 12274 - protein, 17 aa, synthetic construct
KTSQSVFSTSYNRDYLA

SEQ ID NO: 12275 - protein, 11 aa, synthetic construct
RASQSISSWLA

SEQ ID NO: 12276 - protein, 11 aa, synthetic construct
RASQSISSYLN

SEQ ID NO: 12277 - protein, 11 aa, synthetic construct
RASQSVSSYLA

SEQ ID NO: 12278 - protein, 17 aa, synthetic construct
KSSQSVLYSSNNKNYLA

SEQ ID NO: 12279 - protein, 17 aa, synthetic construct
KSSQSVLSSSYNKNYVA

SEQ ID NO: 12280 - protein, 11 aa, synthetic construct
QASQDISNYLN

SEQ ID NO: 12281 - protein, 11 aa, synthetic construct
RASQDINTYLA

SEQ ID NO: 12282 - protein, 11 aa, synthetic construct
QASQDISNYLN

SEQ ID NO: 12283 - protein, 11 aa, synthetic construct
RASQSISRYLA

SEQ ID NO: 12284 - protein, 11 aa, synthetic construct
RASQTLSGWLA

SEQ ID NO: 12285 - protein, 11 aa, synthetic construct
FASQDIINYLN

SEQ ID NO: 12286 - protein, 11 aa, synthetic construct
RASQSISSYLN

SEQ ID NO: 12287 - protein, 11 aa, synthetic construct
QASQDISNYLN

SEQ ID NO: 12288 - protein, 11 aa, synthetic construct
RASQSISSYLN

SEQ ID NO: 12289 - protein, 16 aa, synthetic construct
RSSQSLLHSNGYNYLD

SEQ ID NO: 12290 - protein, 17 aa, synthetic construct
KSSQSVLYSSNNKNYLA

SEQ ID NO: 12291 - protein, 16 aa, synthetic construct
RSSQSLLHSNGYNYLD

SEQ ID NO: 12292 - protein, 11 aa, synthetic construct
RASESVSTWLA

SEQ ID NO: 12293 - protein, 17 aa, synthetic construct
KSSQSVLYSSNNKNYLA

SEQ ID NO: 12294 - protein, 11 aa, synthetic construct
RASQSISSYLN

SEQ ID NO: 12295 - protein, 17 aa, synthetic construct
KSSQSVLSSSYNKNYLA

SEQ ID NO: 12296 - protein, 11 aa, synthetic construct
RASQSISSYLN

SEQ ID NO: 12297 - protein, 11 aa, synthetic construct
RASQSISRWLA

SEQ ID NO: 12298 - protein, 17 aa, synthetic construct
KTSQSVFSTSYNRDYLA

SEQ ID NO: 12299 - protein, 11 aa, synthetic construct
RASQSINRYLN

SEQ ID NO: 12300 - protein, 11 aa, synthetic construct
RASQGISNYLA

SEQ ID NO: 12301 - protein, 11 aa, synthetic construct
RASQGISNYLA

SEQ ID NO: 12302 - protein, 11 aa, synthetic construct
RASQSIDSYLN

SEQ ID NO: 12303 - protein, 11 aa, synthetic construct
RASQDISTWLA

SEQ ID NO: 12304 - protein, 11 aa, synthetic construct
QASQDISNYLN

SEQ ID NO: 12305 - protein, 11 aa, synthetic construct
RASQGISNYLA

SEQ ID NO: 12306 - protein, 11 aa, synthetic construct
RASQSVSTYLA

SEQ ID NO: 12307 - protein, 11 aa, synthetic construct
RASQGIRNDLG

SEQ ID NO: 12308 - protein, 11 aa, synthetic construct
RASESISTYLN

SEQ ID NO: 12309 - protein, 11 aa, synthetic construct
RASRNIHDYLN

SEQ ID NO: 12310 - protein, 11 aa, synthetic construct
RASQSNDSYLN

SEQ ID NO: 12311 - protein, 11 aa, synthetic construct
RASQSISDFLN

SEQ ID NO: 12312 - protein, 11 aa, synthetic construct
QASQDISNYLN

SEQ ID NO: 12313 - protein, 11 aa, synthetic construct
QASQDISNYLN

SEQ ID NO: 12314 - protein, 16 aa, synthetic construct
RSSQSLLHSNGYNYLD

SEQ ID NO: 12315 - protein, 11 aa, synthetic construct
RASQSISSYLN

SEQ ID NO: 12316 - protein, 11 aa, synthetic construct
RASQGISDYLA

SEQ ID NO: 12317 - protein, 11 aa, synthetic construct
RASQDINDFLA

SEQ ID NO: 12318 - protein, 11 aa, synthetic construct
RASQSISNWLA

SEQ ID NO: 12319 - protein, 11 aa, synthetic construct
RASQGIDSWLA

SEQ ID NO: 12320 - protein, 11 aa, synthetic construct
RASQNIGTWLA

SEQ ID NO: 12321 - protein, 11 aa, synthetic construct
RASQNINNWLA

SEQ ID NO: 12322 - protein, 11 aa, synthetic construct
RASQDISSYLA

SEQ ID NO: 12323 - protein, 11 aa, synthetic construct
RASQDISNYLA

SEQ ID NO: 12324-12453 - skipped (130 entries)

SEQ ID NO: 12454 - protein, 7 aa, synthetic construct
DASNLET

SEQ ID NO: 12455 - protein, 7 aa, synthetic construct
AASSLQS

SEQ ID NO: 12456 - protein, 7 aa, synthetic construct
KASSLET

SEQ ID NO: 12457 - protein, 7 aa, synthetic construct
DASNLET

SEQ ID NO: 12458 - protein, 7 aa, synthetic construct
EASSLQS

SEQ ID NO: 12459 - protein, 7 aa, synthetic construct
AASSLQS

SEQ ID NO: 12460 - protein, 7 aa, synthetic construct
WASTRES

SEQ ID NO: 12461 - protein, 7 aa, synthetic construct
WASTRAS

SEQ ID NO: 12462 - protein, 7 aa, synthetic construct
DASHLEA

SEQ ID NO: 12463 - protein, 7 aa, synthetic construct
AASTLQT

SEQ ID NO: 12464 - protein, 7 aa, synthetic construct
AASSLQS

SEQ ID NO: 12465 - protein, 7 aa, synthetic construct
DASSLES

SEQ ID NO: 12466 - protein, 7 aa, synthetic construct
WASTRES

SEQ ID NO: 12467 - protein, 7 aa, synthetic construct
WASTRES

SEQ ID NO: 12468 - protein, 7 aa, synthetic construct
WASTRES

SEQ ID NO: 12469 - protein, 7 aa, synthetic construct
WASTRES

SEQ ID NO: 12470 - protein, 7 aa, synthetic construct
WASTRES

SEQ ID NO: 12471 - protein, 7 aa, synthetic construct
WASTRES

SEQ ID NO: 12472 - protein, 7 aa, synthetic construct
WASTRAS

SEQ ID NO: 12473 - protein, 7 aa, synthetic construct
DASTLQS

SEQ ID NO: 12474 - protein, 7 aa, synthetic construct
NASNLET

SEQ ID NO: 12475 - protein, 7 aa, synthetic construct
AASTLRS

SEQ ID NO: 12476 - protein, 7 aa, synthetic construct
AASTLQS

SEQ ID NO: 12477 - protein, 7 aa, synthetic construct
AASTLQS

SEQ ID NO: 12478 - protein, 7 aa, synthetic construct
DASSLQS

SEQ ID NO: 12479 - protein, 7 aa, synthetic construct
DASSLQS

SEQ ID NO: 12480 - protein, 7 aa, synthetic construct
AASSLQS

SEQ ID NO: 12481 - protein, 7 aa, synthetic construct
AASTLQS

SEQ ID NO: 12482 - protein, 7 aa, synthetic construct
DASSLQS

SEQ ID NO: 12483 - protein, 7 aa, synthetic construct
AASSLQS

SEQ ID NO: 12484 - protein, 7 aa, synthetic construct
AASTLQP

SEQ ID NO: 12485 - protein, 7 aa, synthetic construct
AASTLQP

SEQ ID NO: 12486 - protein, 7 aa, synthetic construct
AASRLQS

SEQ ID NO: 12487 - protein, 7 aa, synthetic construct
AASTLQS

SEQ ID NO: 12488 - protein, 7 aa, synthetic construct
DASNLET

SEQ ID NO: 12489 - protein, 7 aa, synthetic construct
DTSSLQS

SEQ ID NO: 12490 - protein, 7 aa, synthetic construct
AASTLQS

SEQ ID NO: 12491 - protein, 7 aa, synthetic construct
AASTLQS

SEQ ID NO: 12492 - protein, 7 aa, synthetic construct
AASSLQS

SEQ ID NO: 12493 - protein, 7 aa, synthetic construct
AASTLQS

SEQ ID NO: 12494 - protein, 7 aa, synthetic construct
KASSLES

SEQ ID NO: 12495 - protein, 7 aa, synthetic construct
AASTLQS

SEQ ID NO: 12496 - protein, 7 aa, synthetic construct
DASNLET

SEQ ID NO: 12497 - protein, 7 aa, synthetic construct
LGSNRAS

SEQ ID NO: 12498 - protein, 7 aa, synthetic construct
FGSNRAS

SEQ ID NO: 12499 - protein, 7 aa, synthetic construct
WASSRQS

SEQ ID NO: 12500 - protein, 7 aa, synthetic construct
WASVRES

SEQ ID NO: 12501 - protein, 7 aa, synthetic construct
WASTRES

SEQ ID NO: 12502 - protein, 7 aa, synthetic construct
AASSLQS

SEQ ID NO: 12503 - protein, 7 aa, synthetic construct
EASTLQS

SEQ ID NO: 12504 - protein, 7 aa, synthetic construct
RASTLES

SEQ ID NO: 12505 - protein, 7 aa, synthetic construct
AASRLQS

SEQ ID NO: 12506 - protein, 7 aa, synthetic construct
AASSLQS

SEQ ID NO: 12507 - protein, 7 aa, synthetic construct
AASSLQS

SEQ ID NO: 12508 - protein, 7 aa, synthetic construct
AASTLQS

SEQ ID NO: 12509 - protein, 7 aa, synthetic construct
GASTRAT

SEQ ID NO: 12510 - protein, 7 aa, synthetic construct
GASTRAT

SEQ ID NO: 12511 - protein, 7 aa, synthetic construct
DASNLET

SEQ ID NO: 12512 - protein, 7 aa, synthetic construct
WASTRES

SEQ ID NO: 12513 - protein, 7 aa, synthetic construct
WASTRES

SEQ ID NO: 12514 - protein, 7 aa, synthetic construct
WASARES

SEQ ID NO: 12515 - protein, 7 aa, synthetic construct
WASTRDS

SEQ ID NO: 12516 - protein, 7 aa, synthetic construct
WASTRAS

SEQ ID NO: 12517 - protein, 7 aa, synthetic construct
WASTRQS

SEQ ID NO: 12518 - protein, 7 aa, synthetic construct
WASTRES

SEQ ID NO: 12519 - protein, 7 aa, synthetic construct
AASSLQS

SEQ ID NO: 12520 - protein, 7 aa, synthetic construct
GASTLQS

SEQ ID NO: 12521 - protein, 7 aa, synthetic construct
DASSLHS

SEQ ID NO: 12522 - protein, 7 aa, synthetic construct
KASSLES

SEQ ID NO: 12523 - protein, 7 aa, synthetic construct
KASSLES

SEQ ID NO: 12524 - protein, 7 aa, synthetic construct
SASNLQS

SEQ ID NO: 12525 - protein, 7 aa, synthetic construct
AASSLQS

SEQ ID NO: 12526 - protein, 7 aa, synthetic construct
DASSLET

SEQ ID NO: 12527 - protein, 7 aa, synthetic construct
AASTLQS

SEQ ID NO: 12528 - protein, 7 aa, synthetic construct
AASSLHS

SEQ ID NO: 12529 - protein, 7 aa, synthetic construct
AASTLQS

SEQ ID NO: 12530 - protein, 7 aa, synthetic construct
AASSLQS

SEQ ID NO: 12531 - protein, 7 aa, synthetic construct
GASSLQS

SEQ ID NO: 12532 - protein, 7 aa, synthetic construct
LGSDRAS

SEQ ID NO: 12533 - protein, 7 aa, synthetic construct
WASTRES

SEQ ID NO: 12534 - protein, 7 aa, synthetic construct
WASTRES

SEQ ID NO: 12535 - protein, 7 aa, synthetic construct
DASTLQS

SEQ ID NO: 12536 - protein, 7 aa, synthetic construct
DASNLKT

SEQ ID NO: 12537 - protein, 7 aa, synthetic construct
DTSSRAT

SEQ ID NO: 12538 - protein, 7 aa, synthetic construct
LASTREP

SEQ ID NO: 12539 - protein, 7 aa, synthetic construct
WASTRES

SEQ ID NO: 12540 - protein, 7 aa, synthetic construct
AAASLQS

SEQ ID NO: 12541 - protein, 7 aa, synthetic construct
AASSLQS

SEQ ID NO: 12542 - protein, 7 aa, synthetic construct
AASSLQS

SEQ ID NO: 12543 - protein, 7 aa, synthetic construct
GASTRES

SEQ ID NO: 12544 - protein, 7 aa, synthetic construct
GASTLQG

SEQ ID NO: 12545 - protein, 7 aa, synthetic construct
EASNLET

SEQ ID NO: 12546 - protein, 7 aa, synthetic construct
DVFNLGT

SEQ ID NO: 12547 - protein, 7 aa, synthetic construct
MASNLES

SEQ ID NO: 12548 - protein, 7 aa, synthetic construct
DASNLET

SEQ ID NO: 12549 - protein, 7 aa, synthetic construct
LGSNRAS

SEQ ID NO: 12550 - protein, 7 aa, synthetic construct
WASTRES

SEQ ID NO: 12551 - protein, 7 aa, synthetic construct
LGSNRAS

SEQ ID NO: 12552 - protein, 7 aa, synthetic construct
KASRLES

SEQ ID NO: 12553 - protein, 7 aa, synthetic construct
WASTRES

SEQ ID NO: 12554 - protein, 7 aa, synthetic construct
AASSLQS

SEQ ID NO: 12555 - protein, 7 aa, synthetic construct
WASTRAS

SEQ ID NO: 12556 - protein, 7 aa, synthetic construct
KASTLES

SEQ ID NO: 12557 - protein, 7 aa, synthetic construct
DASNLET

SEQ ID NO: 12558 - protein, 7 aa, synthetic construct
WASTRAA

SEQ ID NO: 12559 - protein, 7 aa, synthetic construct
AASSLQS

SEQ ID NO: 12560 - protein, 7 aa, synthetic construct
SASNLQS

SEQ ID NO: 12561 - protein, 7 aa, synthetic construct
SASNLQS

SEQ ID NO: 12562 - protein, 7 aa, synthetic construct
KASTLES

SEQ ID NO: 12563 - protein, 7 aa, synthetic construct
DASNLET

SEQ ID NO: 12564 - protein, 7 aa, synthetic construct
AASTLES

SEQ ID NO: 12565 - protein, 7 aa, synthetic construct
AASSLQS

SEQ ID NO: 12566 - protein, 7 aa, synthetic construct
GASTRAT

SEQ ID NO: 12567 - protein, 7 aa, synthetic construct
AASSLQS

SEQ ID NO: 12568 - protein, 7 aa, synthetic construct
KASNLES

SEQ ID NO: 12569 - protein, 7 aa, synthetic construct
AASTLQT

SEQ ID NO: 12570 - protein, 7 aa, synthetic construct
KASTLES

SEQ ID NO: 12571 - protein, 7 aa, synthetic construct
AASTLQS

SEQ ID NO: 12572 - protein, 7 aa, synthetic construct
AASSLQS

SEQ ID NO: 12573 - protein, 7 aa, synthetic construct
KASNLQS

SEQ ID NO: 12574 - protein, 7 aa, synthetic construct
LGSNRAS

SEQ ID NO: 12575 - protein, 7 aa, synthetic construct
DASNLET

SEQ ID NO: 12576 - protein, 7 aa, synthetic construct
DASNLET

SEQ ID NO: 12577 - protein, 7 aa, synthetic construct
AASSLQS

SEQ ID NO: 12578 - protein, 7 aa, synthetic construct
AASKLES

SEQ ID NO: 12579 - protein, 7 aa, synthetic construct
AASTLES

SEQ ID NO: 12580 - protein, 7 aa, synthetic construct
RASSLES

SEQ ID NO: 12581 - protein, 7 aa, synthetic construct
KASTLQS

SEQ ID NO: 12582 - protein, 7 aa, synthetic construct
AASTLQS

SEQ ID NO: 12583 - protein, 7 aa, synthetic construct
AASILHS

SEQ ID NO: 12584-12713 - skipped (130 entries)

SEQ ID NO: 12714 - protein, 9 aa, synthetic construct
QQSYSTPLT

SEQ ID NO: 12715 - protein, 9 aa, synthetic construct
QQSYSTPLT

SEQ ID NO: 12716 - protein, 9 aa, synthetic construct
QQSFSSPLT

SEQ ID NO: 12717 - protein, 9 aa, synthetic construct
QQSYSTPLT

SEQ ID NO: 12718 - protein, 9 aa, synthetic construct
QQANSFPFT

SEQ ID NO: 12719 - protein, 9 aa, synthetic construct
AQHNHYPYT

SEQ ID NO: 12720 - protein, 9 aa, synthetic construct
QQYYTTPFT

SEQ ID NO: 12721 - protein, 9 aa, synthetic construct
QQYYSTPFT

SEQ ID NO: 12722 - protein, 9 aa, synthetic construct
QQANSFPIT

SEQ ID NO: 12723 - protein, 9 aa, synthetic construct
QQASSFPLT

SEQ ID NO: 12724 - protein, 9 aa, synthetic construct
QQSYTFPVT

SEQ ID NO: 12725 - protein, 9 aa, synthetic construct
QQSYSTPFT

SEQ ID NO: 12726 - protein, 9 aa, synthetic construct
QQYYGSPLT

SEQ ID NO: 12727 - protein, 9 aa, synthetic construct
QQYYSSPPT

SEQ ID NO: 12728 - protein, 9 aa, synthetic construct
QQYYSSPPT

SEQ ID NO: 12729 - protein, 9 aa, synthetic construct
QQYYSTPWT

SEQ ID NO: 12730 - protein, 9 aa, synthetic construct
QQYYSTPWT

SEQ ID NO: 12731 - protein, 9 aa, synthetic construct
QQYYSTPWT

SEQ ID NO: 12732 - protein, 9 aa, synthetic construct
QQYYGSPPT

SEQ ID NO: 12733 - protein, 9 aa, synthetic construct
QQAYSFPWT

SEQ ID NO: 12734 - protein, 9 aa, synthetic construct
QQLNSYPFT

SEQ ID NO: 12735 - protein, 9 aa, synthetic construct
LQHYTYPLT

SEQ ID NO: 12736 - protein, 9 aa, synthetic construct
QQSHTIPWT

SEQ ID NO: 12737 - protein, 9 aa, synthetic construct
QQSYSSPYT

SEQ ID NO: 12738 - protein, 9 aa, synthetic construct
QQANSFPLT

SEQ ID NO: 12739 - protein, 9 aa, synthetic construct
QQANSFPLT

SEQ ID NO: 12740 - protein, 9 aa, synthetic construct
QQSYTAPPT

SEQ ID NO: 12741 - protein, 9 aa, synthetic construct
LQHNTYPLT

SEQ ID NO: 12742 - protein, 9 aa, synthetic construct
QQAISFPLT

SEQ ID NO: 12743 - protein, 9 aa, synthetic construct
QQADSFPLT

SEQ ID NO: 12744 - protein, 9 aa, synthetic construct
QQFDSYPIT

SEQ ID NO: 12745 - protein, 9 aa, synthetic construct
QQFDSYPIT

SEQ ID NO: 12746 - protein, 9 aa, synthetic construct
QQSSIIPFT

SEQ ID NO: 12747 - protein, 9 aa, synthetic construct
QQAYSFPYT

SEQ ID NO: 12748 - protein, 9 aa, synthetic construct
QQSYSTPRT

SEQ ID NO: 12749 - protein, 9 aa, synthetic construct
QQTYSTPYT

SEQ ID NO: 12750 - protein, 9 aa, synthetic construct
QQGYSTPYI

SEQ ID NO: 12751 - protein, 9 aa, synthetic construct
QQGYSTPYI

SEQ ID NO: 12752 - protein, 9 aa, synthetic construct
QQTDSIPIT

SEQ ID NO: 12753 - protein, 9 aa, synthetic construct
QQSYSIPYT

SEQ ID NO: 12754 - protein, 9 aa, synthetic construct
QQTYTIPIT

SEQ ID NO: 12755 - protein, 9 aa, synthetic construct
QQANSFPPT

SEQ ID NO: 12756 - protein, 9 aa, synthetic construct
QQVDSYPLT

SEQ ID NO: 12757 - protein, 9 aa, synthetic construct
MQGTHWPPT

SEQ ID NO: 12758 - protein, 9 aa, synthetic construct
MQALQAPVS

SEQ ID NO: 12759 - protein, 9 aa, synthetic construct
QQYYSTPLT

SEQ ID NO: 12760 - protein, 9 aa, synthetic construct
QQYYSTPIT

SEQ ID NO: 12761 - protein, 9 aa, synthetic construct
QQYYSTPFT

SEQ ID NO: 12762 - protein, 9 aa, synthetic construct
QQTYNTPLT

SEQ ID NO: 12763 - protein, 9 aa, synthetic construct
QQSYSTPFT

SEQ ID NO: 12764 - protein, 9 aa, synthetic construct
QQSYSIPLT

SEQ ID NO: 12765 - protein, 9 aa, synthetic construct
QQSYSAPVT

SEQ ID NO: 12766 - protein, 9 aa, synthetic construct
QQAYSFPFT

SEQ ID NO: 12767 - protein, 9 aa, synthetic construct
QQSYSTPLT

SEQ ID NO: 12768 - protein, 8 aa, synthetic construct
QQSYRTVT

SEQ ID NO: 12769 - protein, 9 aa, synthetic construct
QQYDSSSQT

SEQ ID NO: 12770 - protein, 9 aa, synthetic construct
QQYDGSPYT

SEQ ID NO: 12771 - protein, 9 aa, synthetic construct
MQALQTPPA

SEQ ID NO: 12772 - protein, 9 aa, synthetic construct
QQYYSAPPT

SEQ ID NO: 12773 - protein, 9 aa, synthetic construct
QQYYSDPIT

SEQ ID NO: 12774 - protein, 9 aa, synthetic construct
QQYYSIPIA

SEQ ID NO: 12775 - protein, 9 aa, synthetic construct
QQYYSIPYT

SEQ ID NO: 12776 - protein, 9 aa, synthetic construct
QQYYTTPPT

SEQ ID NO: 12777 - protein, 9 aa, synthetic construct
QQYYSTPYT

SEQ ID NO: 12778 - protein, 9 aa, synthetic construct
QQYYSTPLT

SEQ ID NO: 12779 - protein, 8 aa, synthetic construct
QQSYSTPT

SEQ ID NO: 12780 - protein, 9 aa, synthetic construct
QEADSFPLT

SEQ ID NO: 12781 - protein, 9 aa, synthetic construct
QQAYSFPWT

SEQ ID NO: 12782 - protein, 9 aa, synthetic construct
QQSYNTPFT

SEQ ID NO: 12783 - protein, 9 aa, synthetic construct
QQSYNTPFT

SEQ ID NO: 12784 - protein, 9 aa, synthetic construct
QQSYNTPLT

SEQ ID NO: 12785 - protein, 9 aa, synthetic construct
QQANSFPFT

SEQ ID NO: 12786 - protein, 9 aa, synthetic construct
QQLNSYPLT

SEQ ID NO: 12787 - protein, 9 aa, synthetic construct
QQSYSAPLT

SEQ ID NO: 12788 - protein, 9 aa, synthetic construct
QQSYSTPLT

SEQ ID NO: 12789 - protein, 9 aa, synthetic construct
QQSYSTPLT

SEQ ID NO: 12790 - protein, 9 aa, synthetic construct
MQARQTPLT

SEQ ID NO: 12791 - protein, 9 aa, synthetic construct
MQTLQTPFT

SEQ ID NO: 12792 - protein, 9 aa, synthetic construct
MQALQTPLT

SEQ ID NO: 12793 - protein, 9 aa, synthetic construct
QQYYSTPLT

SEQ ID NO: 12794 - protein, 9 aa, synthetic construct
QQYYSSPPT

SEQ ID NO: 12795 - protein, 9 aa, synthetic construct
QQSYSTPFT

SEQ ID NO: 12796 - protein, 8 aa, synthetic construct
QQSYSFPT

SEQ ID NO: 12797 - protein, 9 aa, synthetic construct
QQYYDTPYT

SEQ ID NO: 12798 - protein, 9 aa, synthetic construct
QQYYSTPPT

SEQ ID NO: 12799 - protein, 9 aa, synthetic construct
QQYYSTPLT

SEQ ID NO: 12800 - protein, 9 aa, synthetic construct
QQTYSTPWT

SEQ ID NO: 12801 - protein, 9 aa, synthetic construct
QQSSSFPLT

SEQ ID NO: 12802 - protein, 9 aa, synthetic construct
QQLYNFPYT

SEQ ID NO: 12803 - protein, 9 aa, synthetic construct
QQSYNTPLT

SEQ ID NO: 12804 - protein, 9 aa, synthetic construct
QQYYSYPPT

SEQ ID NO: 12805 - protein, 9 aa, synthetic construct
QQSYSTPLT

SEQ ID NO: 12806 - protein, 9 aa, synthetic construct
QQSYSSPFT

SEQ ID NO: 12807 - protein, 9 aa, synthetic construct
QQTNSFPLT

SEQ ID NO: 12808 - protein, 9 aa, synthetic construct
QQSYSTPLT

SEQ ID NO: 12809 - protein, 9 aa, synthetic construct
MQALQSPWT

SEQ ID NO: 12810 - protein, 9 aa, synthetic construct
QQYYSSPLT

SEQ ID NO: 12811 - protein, 9 aa, synthetic construct
MQALQTPPS

SEQ ID NO: 12812 - protein, 9 aa, synthetic construct
QQSYKTPYT

SEQ ID NO: 12813 - protein, 9 aa, synthetic construct
QQYFTTPLT

SEQ ID NO: 12814 - protein, 9 aa, synthetic construct
QQSYSTPYT

SEQ ID NO: 12815 - protein, 9 aa, synthetic construct
QQYYDTPLT

SEQ ID NO: 12816 - protein, 9 aa, synthetic construct
QQNDSIPIT

SEQ ID NO: 12817 - protein, 9 aa, synthetic construct
LQDYSYPLT

SEQ ID NO: 12818 - protein, 8 aa, synthetic construct
QQYYYTST

SEQ ID NO: 12819 - protein, 9 aa, synthetic construct
QQANSFPPT

SEQ ID NO: 12820 - protein, 9 aa, synthetic construct
QQSYSTPLT

SEQ ID NO: 12821 - protein, 9 aa, synthetic construct
QQSYSTPLT

SEQ ID NO: 12822 - protein, 9 aa, synthetic construct
QQSYSAPLT

SEQ ID NO: 12823 - protein, 9 aa, synthetic construct
QQVNSDPYT

SEQ ID NO: 12824 - protein, 9 aa, synthetic construct
QQGDSLPLT

SEQ ID NO: 12825 - protein, 9 aa, synthetic construct
QQSDSFPYT

SEQ ID NO: 12826 - protein, 9 aa, synthetic construct
QQHDSYPLT

SEQ ID NO: 12827 - protein, 9 aa, synthetic construct
QQANSFPPT

SEQ ID NO: 12828 - protein, 9 aa, synthetic construct
QQTDSTFIT

SEQ ID NO: 12829 - protein, 9 aa, synthetic construct
QQTYSTPPT

SEQ ID NO: 12830 - protein, 9 aa, synthetic construct
QQSYSSPLT

SEQ ID NO: 12831 - protein, 9 aa, synthetic construct
QQSYSSPYT

SEQ ID NO: 12832 - protein, 9 aa, synthetic construct
QQANRFPLT

SEQ ID NO: 12833 - protein, 9 aa, synthetic construct
QQSYNFPAT

SEQ ID NO: 12834 - protein, 9 aa, synthetic construct
MQGTHWPET

SEQ ID NO: 12835 - protein, 9 aa, synthetic construct
QQSYSTPLT

SEQ ID NO: 12836 - protein, 9 aa, synthetic construct
QQSYILPLT

SEQ ID NO: 12837 - protein, 9 aa, synthetic construct
QQSYSAPYT

SEQ ID NO: 12838 - protein, 9 aa, synthetic construct
QQSYSSPWT

SEQ ID NO: 12839 - protein, 9 aa, synthetic construct
QQAYSFPLT

SEQ ID NO: 12840 - protein, 9 aa, synthetic construct
QQAYSFPWT

SEQ ID NO: 12841 - protein, 9 aa, synthetic construct
QQADSFPPT

SEQ ID NO: 12842 - protein, 9 aa, synthetic construct
QQLNRYPIT

SEQ ID NO: 12843 - protein, 9 aa, synthetic construct
QQYDSSFIT

SEQ ID NO: 12844-13103 - skipped (260 entries)

SEQ ID NO: 13104 - protein, 12 aa, synthetic construct
KLLIYDASNLET

SEQ ID NO: 13105 - protein, 12 aa, synthetic construct
KLLIYAASSLQS

SEQ ID NO: 13106 - protein, 12 aa, synthetic construct
KLLIYKASSLET

SEQ ID NO: 13107 - protein, 12 aa, synthetic construct
KLLIYDASNLET

SEQ ID NO: 13108 - protein, 12 aa, synthetic construct
KLLIYEASSLQS

SEQ ID NO: 13109 - protein, 12 aa, synthetic construct
KLLIYAASSLQS

SEQ ID NO: 13110 - protein, 12 aa, synthetic construct
KLLIYWASTRES

SEQ ID NO: 13111 - protein, 12 aa, synthetic construct
KLLIYWASTRAS

SEQ ID NO: 13112 - protein, 12 aa, synthetic construct
KLLIYDASHLEA

SEQ ID NO: 13113 - protein, 12 aa, synthetic construct
KLLIYAASTLQT

SEQ ID NO: 13114 - protein, 12 aa, synthetic construct
KLLIYAASSLQS

SEQ ID NO: 13115 - protein, 12 aa, synthetic construct
KLLIYDASSLES

SEQ ID NO: 13116 - protein, 12 aa, synthetic construct
KLLIYWASTRES

SEQ ID NO: 13117 - protein, 12 aa, synthetic construct
KLLIYWASTRES

SEQ ID NO: 13118 - protein, 12 aa, synthetic construct
KLLIYWASTRES

SEQ ID NO: 13119 - protein, 12 aa, synthetic construct
KLLIYWASTRES

SEQ ID NO: 13120 - protein, 12 aa, synthetic construct
KLLIYWASTRES

SEQ ID NO: 13121 - protein, 12 aa, synthetic construct
KLLIYWASTRES

SEQ ID NO: 13122 - protein, 12 aa, synthetic construct
KLLIYWASTRAS

SEQ ID NO: 13123 - protein, 12 aa, synthetic construct
KLLIYDASTLQS

SEQ ID NO: 13124 - protein, 12 aa, synthetic construct
KLLIYNASNLET

SEQ ID NO: 13125 - protein, 12 aa, synthetic construct
KLLIYAASTLRS

SEQ ID NO: 13126 - protein, 12 aa, synthetic construct
KLLIYAASTLQS

SEQ ID NO: 13127 - protein, 12 aa, synthetic construct
KLLIYAASTLQS

SEQ ID NO: 13128 - protein, 12 aa, synthetic construct
KLLIYDASSLQS

SEQ ID NO: 13129 - protein, 12 aa, synthetic construct
KLLIYDASSLQS

SEQ ID NO: 13130 - protein, 12 aa, synthetic construct
KLLIYAASSLQS

SEQ ID NO: 13131 - protein, 12 aa, synthetic construct
KLLIYAASTLQS

SEQ ID NO: 13132 - protein, 12 aa, synthetic construct
KLLIYDASSLQS

SEQ ID NO: 13133 - protein, 12 aa, synthetic construct
KLLIYAASSLQS

SEQ ID NO: 13134 - protein, 12 aa, synthetic construct
KLLIYAASTLQP

SEQ ID NO: 13135 - protein, 12 aa, synthetic construct
KLLIYAASTLQP

SEQ ID NO: 13136 - protein, 12 aa, synthetic construct
KLLIYAASRLQS

SEQ ID NO: 13137 - protein, 12 aa, synthetic construct
KLLIYAASTLQS

SEQ ID NO: 13138 - protein, 12 aa, synthetic construct
KLLIYDASNLET

SEQ ID NO: 13139 - protein, 12 aa, synthetic construct
KLLIYDTSSLQS

SEQ ID NO: 13140 - protein, 12 aa, synthetic construct
KLLIYAASTLQS

SEQ ID NO: 13141 - protein, 12 aa, synthetic construct
KLLIYAASTLQS

SEQ ID NO: 13142 - protein, 12 aa, synthetic construct
KLLIYAASSLQS

SEQ ID NO: 13143 - protein, 12 aa, synthetic construct
KLLIYAASTLQS

SEQ ID NO: 13144 - protein, 12 aa, synthetic construct
KLLIYKASSLES

SEQ ID NO: 13145 - protein, 12 aa, synthetic construct
KLLIYAASTLQS

SEQ ID NO: 13146 - protein, 12 aa, synthetic construct
KLLIYDASNLET

SEQ ID NO: 13147 - protein, 12 aa, synthetic construct
QLLIYLGSNRAS

SEQ ID NO: 13148 - protein, 12 aa, synthetic construct
QLLIYFGSNRAS

SEQ ID NO: 13149 - protein, 12 aa, synthetic construct
KLLIYWASSRQS

SEQ ID NO: 13150 - protein, 12 aa, synthetic construct
KLLIYWASVRES

SEQ ID NO: 13151 - protein, 12 aa, synthetic construct
KLLIYWASTRES

SEQ ID NO: 13152 - protein, 12 aa, synthetic construct
KLLIYAASSLQS

SEQ ID NO: 13153 - protein, 12 aa, synthetic construct
KLLIYEASTLQS

SEQ ID NO: 13154 - protein, 12 aa, synthetic construct
KLLIYRASTLES

SEQ ID NO: 13155 - protein, 12 aa, synthetic construct
KLLIYAASRLQS

SEQ ID NO: 13156 - protein, 12 aa, synthetic construct
KLLIYAASSLQS

SEQ ID NO: 13157 - protein, 12 aa, synthetic construct
KLLIYAASSLQS

SEQ ID NO: 13158 - protein, 12 aa, synthetic construct
KLLIYAASTLQS

SEQ ID NO: 13159 - protein, 12 aa, synthetic construct
RLLIYGASTRAT

SEQ ID NO: 13160 - protein, 12 aa, synthetic construct
RLLIYGASTRAT

SEQ ID NO: 13161 - protein, 12 aa, synthetic construct
QLLIYDASNLET

SEQ ID NO: 13162 - protein, 12 aa, synthetic construct
KLLIYWASTRES

SEQ ID NO: 13163 - protein, 12 aa, synthetic construct
KLLIYWASTRES

SEQ ID NO: 13164 - protein, 12 aa, synthetic construct
KLLIYWASARES

SEQ ID NO: 13165 - protein, 12 aa, synthetic construct
KLLIYWASTRDS

SEQ ID NO: 13166 - protein, 12 aa, synthetic construct
KLLIYWASTRAS

SEQ ID NO: 13167 - protein, 12 aa, synthetic construct
KLLIYWASTRQS

SEQ ID NO: 13168 - protein, 12 aa, synthetic construct
KLLIYWASTRES

SEQ ID NO: 13169 - protein, 12 aa, synthetic construct
KLLIYAASSLQS

SEQ ID NO: 13170 - protein, 12 aa, synthetic construct
KLLIYGASTLQS

SEQ ID NO: 13171 - protein, 12 aa, synthetic construct
KLLIYDASSLHS

SEQ ID NO: 13172 - protein, 12 aa, synthetic construct
KLLIYKASSLES

SEQ ID NO: 13173 - protein, 12 aa, synthetic construct
KLLIYKASSLES

SEQ ID NO: 13174 - protein, 12 aa, synthetic construct
KLLIYSASNLQS

SEQ ID NO: 13175 - protein, 12 aa, synthetic construct
KLLIYAASSLQS

SEQ ID NO: 13176 - protein, 12 aa, synthetic construct
KLLIYDASSLET

SEQ ID NO: 13177 - protein, 12 aa, synthetic construct
KLLIYAASTLQS

SEQ ID NO: 13178 - protein, 12 aa, synthetic construct
KLLIYAASSLHS

SEQ ID NO: 13179 - protein, 12 aa, synthetic construct
KLLIYAASTLQS

SEQ ID NO: 13180 - protein, 12 aa, synthetic construct
QLLIYAASSLQS

SEQ ID NO: 13181 - protein, 12 aa, synthetic construct
QLLIYGASSLQS

SEQ ID NO: 13182 - protein, 12 aa, synthetic construct
QLLIYLGSDRAS

SEQ ID NO: 13183 - protein, 12 aa, synthetic construct
KLLIYWASTRES

SEQ ID NO: 13184 - protein, 12 aa, synthetic construct
KLLIYWASTRES

SEQ ID NO: 13185 - protein, 12 aa, synthetic construct
KLLIYDASTLQS

SEQ ID NO: 13186 - protein, 12 aa, synthetic construct
KLLIYDASNLKT

SEQ ID NO: 13187 - protein, 12 aa, synthetic construct
RLLIYDTSSRAT

SEQ ID NO: 13188 - protein, 12 aa, synthetic construct
KLLIYLASTREP

SEQ ID NO: 13189 - protein, 12 aa, synthetic construct
KLLIYWASTRES

SEQ ID NO: 13190 - protein, 12 aa, synthetic construct
KLLIYAAASLQS

SEQ ID NO: 13191 - protein, 12 aa, synthetic construct
KLLIYAASSLQS

SEQ ID NO: 13192 - protein, 12 aa, synthetic construct
KLLIYAASSLQS

SEQ ID NO: 13193 - protein, 12 aa, synthetic construct
KLLIYGASTRES

SEQ ID NO: 13194 - protein, 12 aa, synthetic construct
KLLIYGASTLQG

SEQ ID NO: 13195 - protein, 12 aa, synthetic construct
KLLIYEASNLET

SEQ ID NO: 13196 - protein, 12 aa, synthetic construct
KLLIYDVFNLGT

SEQ ID NO: 13197 - protein, 12 aa, synthetic construct
KLLIYMASNLES

SEQ ID NO: 13198 - protein, 12 aa, synthetic construct
KLLIYDASNLET

SEQ ID NO: 13199 - protein, 12 aa, synthetic construct
QLLIYLGSNRAS

SEQ ID NO: 13200 - protein, 12 aa, synthetic construct
KLLIYWASTRES

SEQ ID NO: 13201 - protein, 12 aa, synthetic construct
QLLIYLGSNRAS

SEQ ID NO: 13202 - protein, 12 aa, synthetic construct
KLLIYKASRLES

SEQ ID NO: 13203 - protein, 12 aa, synthetic construct
KLLIYWASTRES

SEQ ID NO: 13204 - protein, 12 aa, synthetic construct
KLLIYAASSLQS

SEQ ID NO: 13205 - protein, 12 aa, synthetic construct
KLLIYWASTRAS

SEQ ID NO: 13206 - protein, 12 aa, synthetic construct
KLLIYKASTLES

SEQ ID NO: 13207 - protein, 12 aa, synthetic construct
KLLIYDASNLET

SEQ ID NO: 13208 - protein, 12 aa, synthetic construct
KLLIYWASTRAA

SEQ ID NO: 13209 - protein, 12 aa, synthetic construct
KLLIYAASSLQS

SEQ ID NO: 13210 - protein, 12 aa, synthetic construct
KLLIYSASNLQS

SEQ ID NO: 13211 - protein, 12 aa, synthetic construct
KLLIYSASNLQS

SEQ ID NO: 13212 - protein, 12 aa, synthetic construct
KLLIYKASTLES

SEQ ID NO: 13213 - protein, 12 aa, synthetic construct
KLLIYDASNLET

SEQ ID NO: 13214 - protein, 12 aa, synthetic construct
KLLIYAASTLES

SEQ ID NO: 13215 - protein, 12 aa, synthetic construct
KLLIYAASSLQS

SEQ ID NO: 13216 - protein, 12 aa, synthetic construct
RLLIYGASTRAT

SEQ ID NO: 13217 - protein, 12 aa, synthetic construct
KLLIYAASSLQS

SEQ ID NO: 13218 - protein, 12 aa, synthetic construct
KLLIYKASNLES

SEQ ID NO: 13219 - protein, 12 aa, synthetic construct
KLLIYAASTLQT

SEQ ID NO: 13220 - protein, 12 aa, synthetic construct
KLLIYKASTLES

SEQ ID NO: 13221 - protein, 12 aa, synthetic construct
KLLIYAASTLQS

SEQ ID NO: 13222 - protein, 12 aa, synthetic construct
KLLIYAASSLQS

SEQ ID NO: 13223 - protein, 12 aa, synthetic construct
KLLIYKASNLQS

SEQ ID NO: 13224 - protein, 12 aa, synthetic construct
QLLIYLGSNRAS

SEQ ID NO: 13225 - protein, 12 aa, synthetic construct
KLLIYDASNLET

SEQ ID NO: 13226 - protein, 12 aa, synthetic construct
KLLIYDASNLET

SEQ ID NO: 13227 - protein, 12 aa, synthetic construct
KLLIYAASSLQS

SEQ ID NO: 13228 - protein, 12 aa, synthetic construct
KLLIYAASKLES

SEQ ID NO: 13229 - protein, 12 aa, synthetic construct
KLLIYAASTLES

SEQ ID NO: 13230 - protein, 12 aa, synthetic construct
KLLIYRASSLES

SEQ ID NO: 13231 - protein, 12 aa, synthetic construct
KLLIYKASTLQS

SEQ ID NO: 13232 - protein, 12 aa, synthetic construct
KLLIYAASTLQS

SEQ ID NO: 13233 - protein, 12 aa, synthetic construct
KLLIYAASILHS

SEQ ID NO: 13234-13363 - skipped (130 entries)

SEQ ID NO: 13364 - protein, 6 aa, synthetic construct
QDISNY

SEQ ID NO: 13365 - protein, 6 aa, synthetic construct
QSISSY

SEQ ID NO: 13366 - protein, 6 aa, synthetic construct
QDISNY

SEQ ID NO: 13367 - protein, 6 aa, synthetic construct
QDISNY

SEQ ID NO: 13368 - protein, 6 aa, synthetic construct
QNVNTW

SEQ ID NO: 13369 - protein, 6 aa, synthetic construct
QSISDW

SEQ ID NO: 13370 - protein, 6 aa, synthetic construct
QAIRDD

SEQ ID NO: 13371 - protein, 6 aa, synthetic construct
QGVGND

SEQ ID NO: 13372 - protein, 6 aa, synthetic construct
QIIGTN

SEQ ID NO: 13373 - protein, 6 aa, synthetic construct
QSISTW

SEQ ID NO: 13374 - protein, 6 aa, synthetic construct
QDIRNY

SEQ ID NO: 13375 - protein, 6 aa, synthetic construct
QDISNY

SEQ ID NO: 13376 - protein, 6 aa, synthetic construct
QSISTW

SEQ ID NO: 13377 - protein, 6 aa, synthetic construct
EDISTY

SEQ ID NO: 13378 - protein, 6 aa, synthetic construct
HHISDF

SEQ ID NO: 13379 - protein, 6 aa, synthetic construct
QDIGDY

SEQ ID NO: 13380 - protein, 6 aa, synthetic construct
QDIGDY

SEQ ID NO: 13381 - protein, 6 aa, synthetic construct
QDIRSY

SEQ ID NO: 13382 - protein, 6 aa, synthetic construct
QDISNN

SEQ ID NO: 13383 - protein, 6 aa, synthetic construct
QDISNW

SEQ ID NO: 13384 - protein, 6 aa, synthetic construct
QGIANY

SEQ ID NO: 13385 - protein, 6 aa, synthetic construct
QGIASY

SEQ ID NO: 13386 - protein, 6 aa, synthetic construct
QGIASY

SEQ ID NO: 13387 - protein, 6 aa, synthetic construct
QGISNY

SEQ ID NO: 13388 - protein, 6 aa, synthetic construct
QGISNY

SEQ ID NO: 13389 - protein, 6 aa, synthetic construct
QSIGRW

SEQ ID NO: 13390 - protein, 6 aa, synthetic construct
QSINSW

SEQ ID NO: 13391 - protein, 6 aa, synthetic construct
QSISSW

SEQ ID NO: 13392 - protein, 6 aa, synthetic construct
QSISSW

SEQ ID NO: 13393 - protein, 6 aa, synthetic construct
QSISSY

SEQ ID NO: 13394 - protein, 6 aa, synthetic construct
QSISSY

SEQ ID NO: 13395 - protein, 6 aa, synthetic construct
QTIRSY

SEQ ID NO: 13396 - protein, 6 aa, synthetic construct
QTISNW

SEQ ID NO: 13397 - protein, 6 aa, synthetic construct
QYIGSY

SEQ ID NO: 13398 - protein, 6 aa, synthetic construct
QDIGNY

SEQ ID NO: 13399 - protein, 6 aa, synthetic construct
QDISNY

SEQ ID NO: 13400 - protein, 6 aa, synthetic construct
QDISTW

SEQ ID NO: 13401 - protein, 6 aa, synthetic construct
QNINNY

SEQ ID NO: 13402 - protein, 6 aa, synthetic construct
QNINTW

SEQ ID NO: 13403 - protein, 6 aa, synthetic construct
QRIGNY

SEQ ID NO: 13404 - protein, 6 aa, synthetic construct
QSISTY

SEQ ID NO: 13405 - protein, 6 aa, synthetic construct
QDISNY

SEQ ID NO: 13406 - protein, 6 aa, synthetic construct
QDISNY

SEQ ID NO: 13407 - protein, 6 aa, synthetic construct
QGIRND

SEQ ID NO: 13408 - protein, 6 aa, synthetic construct
QGISNY

SEQ ID NO: 13409 - protein, 6 aa, synthetic construct
QGISNY

SEQ ID NO: 13410 - protein, 6 aa, synthetic construct
QSINRW

SEQ ID NO: 13411 - protein, 6 aa, synthetic construct
QSINTW

SEQ ID NO: 13412 - protein, 6 aa, synthetic construct
QSIRTW

SEQ ID NO: 13413 - protein, 6 aa, synthetic construct
QSIRTY

SEQ ID NO: 13414 - protein, 6 aa, synthetic construct
QSISTY

SEQ ID NO: 13415 - protein, 6 aa, synthetic construct
QSITTY

SEQ ID NO: 13416 - protein, 6 aa, synthetic construct
QSISSW

SEQ ID NO: 13417 - protein, 6 aa, synthetic construct
QSISSY

SEQ ID NO: 13418 - protein, 6 aa, synthetic construct
QDISNY

SEQ ID NO: 13419 - protein, 6 aa, synthetic construct
QDINTY

SEQ ID NO: 13420 - protein, 6 aa, synthetic construct
QDISNY

SEQ ID NO: 13421 - protein, 6 aa, synthetic construct
QSISRY

SEQ ID NO: 13422 - protein, 6 aa, synthetic construct
QTLSGW

SEQ ID NO: 13423 - protein, 6 aa, synthetic construct
QDIINY

SEQ ID NO: 13424 - protein, 6 aa, synthetic construct
QSISSY

SEQ ID NO: 13425 - protein, 6 aa, synthetic construct
QDISNY

SEQ ID NO: 13426 - protein, 6 aa, synthetic construct
QSISSY

SEQ ID NO: 13427 - protein, 6 aa, synthetic construct
ESVSTW

SEQ ID NO: 13428 - protein, 6 aa, synthetic construct
QSISSY

SEQ ID NO: 13429 - protein, 6 aa, synthetic construct
QSISSY

SEQ ID NO: 13430 - protein, 6 aa, synthetic construct
QSISRW

SEQ ID NO: 13431 - protein, 6 aa, synthetic construct
QSINRY

SEQ ID NO: 13432 - protein, 6 aa, synthetic construct
QGISNY

SEQ ID NO: 13433 - protein, 6 aa, synthetic construct
QGISNY

SEQ ID NO: 13434 - protein, 6 aa, synthetic construct
QSIDSY

SEQ ID NO: 13435 - protein, 6 aa, synthetic construct
QDISTW

SEQ ID NO: 13436 - protein, 6 aa, synthetic construct
QDISNY

SEQ ID NO: 13437 - protein, 6 aa, synthetic construct
QGISNY

SEQ ID NO: 13438 - protein, 6 aa, synthetic construct
QGIRND

SEQ ID NO: 13439 - protein, 6 aa, synthetic construct
ESISTY

SEQ ID NO: 13440 - protein, 6 aa, synthetic construct
RNIHDY

SEQ ID NO: 13441 - protein, 6 aa, synthetic construct
QSNDSY

SEQ ID NO: 13442 - protein, 6 aa, synthetic construct
QSISDF

SEQ ID NO: 13443 - protein, 6 aa, synthetic construct
QDISNY

SEQ ID NO: 13444 - protein, 6 aa, synthetic construct
QDISNY

SEQ ID NO: 13445 - protein, 6 aa, synthetic construct
QSISSY

SEQ ID NO: 13446 - protein, 6 aa, synthetic construct
QGISDY

SEQ ID NO: 13447 - protein, 6 aa, synthetic construct
QDINDF

SEQ ID NO: 13448 - protein, 6 aa, synthetic construct
QSISNW

SEQ ID NO: 13449 - protein, 6 aa, synthetic construct
QGIDSW

SEQ ID NO: 13450 - protein, 6 aa, synthetic construct
QNIGTW

SEQ ID NO: 13451 - protein, 6 aa, synthetic construct
QNINNW

SEQ ID NO: 13452 - protein, 6 aa, synthetic construct
QDISSY

SEQ ID NO: 13453 - protein, 6 aa, synthetic construct
QDISNY

SEQ ID NO: 13454 - protein, 11 aa, synthetic construct
QSLLHSNGYNY

SEQ ID NO: 13455 - protein, 11 aa, synthetic construct
QSLLHSNGYNY

SEQ ID NO: 13456 - protein, 11 aa, synthetic construct
QSLLHSNGYNY

SEQ ID NO: 13457 - protein, 11 aa, synthetic construct
QSLLHSNGYNY

SEQ ID NO: 13458 - protein, 11 aa, synthetic construct
QSLLHSNGYNY

SEQ ID NO: 13459 - protein, 11 aa, synthetic construct
QSLLHSNGYNY

SEQ ID NO: 13460 - protein, 11 aa, synthetic construct
QSLLHSNGYNY

SEQ ID NO: 13461 - protein, 11 aa, synthetic construct
QSLLHSNGYNY

SEQ ID NO: 13462 - protein, 11 aa, synthetic construct
QSLLHSNGYNY

SEQ ID NO: 13463 - protein, 6 aa, synthetic construct
QSVGSY

SEQ ID NO: 13464 - protein, 6 aa, synthetic construct
RSVSTY

SEQ ID NO: 13465 - protein, 6 aa, synthetic construct
QSVSSY

SEQ ID NO: 13466 - protein, 6 aa, synthetic construct
QSVSTY

SEQ ID NO: 13467 - protein, 12 aa, synthetic construct
QSVLSSSYNKNY

SEQ ID NO: 13468 - protein, 12 aa, synthetic construct
QSVLSSSYNKNY

SEQ ID NO: 13469 - protein, 12 aa, synthetic construct
QSVLSSSNNKNY

SEQ ID NO: 13470 - protein, 12 aa, synthetic construct
QSVLSSSYNKNY

SEQ ID NO: 13471 - protein, 12 aa, synthetic construct
QSVLSSSYNKNY

SEQ ID NO: 13472 - protein, 12 aa, synthetic construct
QSVLSSSYNKNY

SEQ ID NO: 13473 - protein, 12 aa, synthetic construct
QSVLSSSYNKNY

SEQ ID NO: 13474 - protein, 12 aa, synthetic construct
QSVLSSSYNKNY

SEQ ID NO: 13475 - protein, 12 aa, synthetic construct
QSVLSSSYNKNY

SEQ ID NO: 13476 - protein, 12 aa, synthetic construct
QSVLSSSYNKNY

SEQ ID NO: 13477 - protein, 12 aa, synthetic construct
QSVSSSSYNKNY

SEQ ID NO: 13478 - protein, 12 aa, synthetic construct
QNVLSSSNNNSY

SEQ ID NO: 13479 - protein, 12 aa, synthetic construct
QSVLSSSYNKNF

SEQ ID NO: 13480 - protein, 12 aa, synthetic construct
QSVLSSSYNKNF

SEQ ID NO: 13481 - protein, 12 aa, synthetic construct
QSVLSSSYNKNY

SEQ ID NO: 13482 - protein, 12 aa, synthetic construct
QSVLSSSYNKNY

SEQ ID NO: 13483 - protein, 12 aa, synthetic construct
QSVLSTSYNKNY

SEQ ID NO: 13484 - protein, 12 aa, synthetic construct
QSVLSTSYNRNF

SEQ ID NO: 13485 - protein, 12 aa, synthetic construct
QSVLYSSNNKNY

SEQ ID NO: 13486 - protein, 12 aa, synthetic construct
QTVFSTSYNKNY

SEQ ID NO: 13487 - protein, 12 aa, synthetic construct
QSVFSTSYNRDY

SEQ ID NO: 13488 - protein, 12 aa, synthetic construct
QSVLYSSNNKNY

SEQ ID NO: 13489 - protein, 12 aa, synthetic construct
QSVLSSSYNKNY

SEQ ID NO: 13490 - protein, 12 aa, synthetic construct
QSVLYSSNNKNY

SEQ ID NO: 13491 - protein, 12 aa, synthetic construct
QSVLYSSNNKNY

SEQ ID NO: 13492 - protein, 12 aa, synthetic construct
QSVLSSSYNKNY

SEQ ID NO: 13493 - protein, 12 aa, synthetic construct
QSVFSTSYNRDY

SEQ ID NO: 13494-13999 - skipped (506 entries)

SEQ ID NO: 14000 - protein, 122 aa, synthetic construct
EVQLVESGGGLVQAGGSLRLSCAASGRTSASYSMGWFRQAPGKEREFVAAISWSGDETSYADSVKGRFTIARGNAKNTVYLQMNSLKSEDTAIYYCAGDRWWRPAGLQWDYWGQGTQVTVSS

SEQ ID NO: 14001 - protein, 117 aa, synthetic construct
EVQLVESGGGLVQAGGSLKLSCAASRSILDFNAMGWYRQAPGKQREWVTTIARAGATKYADSVKGRFSISRDNAKNTVYLQMSSLKPEDTATYYCNARVFDLPNDYWGQGTQVTVSS

SEQ ID NO: 14002 - protein, 125 aa, synthetic construct
EVQLVESGGGSVQPGGSLTLSCGTSGRTFNVMGWFRQAPGKEREFVAAVRWSSTGIYYTQYADSVKSRFTISRDNAKNTVYLEMNSLKPEDTAVYYCAADTYNSNPARWDGYDFRGQGTQVTVSS

SEQ ID NO: 14003 - protein, 21 aa, unidentified
MALPVTALLLPLALLLHAARP

SEQ ID NO: 14004 - protein, 20 aa, unidentified
METDTLLLWVLLLWVPGSTG

SEQ ID NO: 14005 - protein, 22 aa, unidentified
MLLLVTSLLLCELPHPAFLLIP

SEQ ID NO: 14006 - protein, 45 aa, unidentified
TTTPAPRPPTPAPTIASQPLSLRPEACRPAAGGAVHTRGLDFACD

SEQ ID NO: 14007 - protein, 39 aa, unidentified
IEVMYPPPYLDNEKSNGTIIHVKGKHLCPSPLFPGPSKP

SEQ ID NO: 14008 - protein, 12 aa, unidentified
ESKYGPPCPPCP

SEQ ID NO: 14009 - protein, 12 aa, unidentified
ESKYGPPCPSCP

SEQ ID NO: 14010 - protein, 229 aa, synthetic construct
ESKYGPPCPPCPAPEFLGGPSVFLFPPKPKDTLMISRTPEVTCVVVDVSQEDPEVQFNWYVDGVEVHNAKTKPREEQFNSTYRVVSVLTVLHQDWLNGKEYKCKVSNKGLPSSIEKTISKAKGQPREPQVYTLPPSQEEMTKNQVSLTCLVKGFYPSDIAVEWESNGQPENNYKTTPPVLDSDGSFFLYSRLTVDKSRWQEGNVFSCSVMHEALHNHYTQKSLSLSLGK

SEQ ID NO: 14011 - protein, 24 aa, unidentified
IYIWAPLAGTCGVLLLSLVITLYC

SEQ ID NO: 14012 - protein, 27 aa, unidentified
FWVLVVVGGVLACYSLLVTVAFIIFWV

SEQ ID NO: 14013 - protein, 42 aa, unidentified
AAAIEVMYPPPYLDNEKSNGTIIHVKGKHLCPSPLFPGPSKP

SEQ ID NO: 14014 - protein, 28 aa, unidentified
MFWVLVVVGGVLACYSLLVTVAFIIFWV

SEQ ID NO: 14015 - protein, 42 aa, unidentified
KRGRKKLLYIFKQPFMRPVQTTQEEDGCSCRFPEEEEGGCEL

SEQ ID NO: 14016 - protein, 41 aa, unidentified
RSKRSRLLHSDYMNMTPRRPGPTRKHYQPYAPPRDFAAYRS

SEQ ID NO: 14017 - protein, 112 aa, unidentified
RVKFSRSADAPAYQQGQNQLYNELNLGRREEYDVLDKRRGRDPEMGGKPRRKNPQEGLYNELQKDKMAEAYSEIGMKGERRRGKGHDGLYQGLSTATKDTYDALHMQALPPR

SEQ ID NO: 14018 - protein, 112 aa, synthetic construct
RVKFSRSADAPAYKQGQNQLYNELNLGRREEYDVLDKRRGRDPEMGGKPRRKNPQEGLYNELQKDKMAEAYSEIGMKGERRRGKGHDGLYQGLSTATKDTYDALHMQALPPR

SEQ ID NO: 14019 - protein, 245 aa, synthetic construct
DIQMTQTTSSLSASLGDRVTISCRASQDISKYLNWYQQKPDGTVKLLIYHTSRLHSGVPSRFSGSGSGTDYSLTISNLEQEDIATYFCQQGNTLPYTFGGGTKLEITGSTSGSGKPGSGEGSTKGEVKLQESGPGLVAPSQSLSVTCTVSGVSLPDYGVSWIRQPPRKGLEWLGVIWGSETTYYNSALKSRLTIIKDNSKSQVFLKMNSLQTDDTAIYYCAKHYYYGGSYAMDYWGQGTSVTVSS

SEQ ID NO: 14020 - protein, 107 aa, synthetic construct
DIQMTQTTSSLSASLGDRVTISCRASQDISKYLNWYQQKPDGTVKLLIYHTSRLHSGVPSRFSGSGSGTDYSLTISNLEQEDIATYFCQQGNTLPYTFGGGTKLEIT

SEQ ID NO: 14021 - protein, 6 aa, synthetic construct
QDISKY

SEQ ID NO: 14022 - skipped

SEQ ID NO: 14023 - protein, 9 aa, synthetic construct
QQGNTLPYT

SEQ ID NO: 14024 - protein, 18 aa, synthetic construct
GSTSGSGKPGSGEGSTKG

SEQ ID NO: 14025 - protein, 120 aa, synthetic construct
EVKLQESGPGLVAPSQSLSVTCTVSGVSLPDYGVSWIRQPPRKGLEWLGVIWGSETTYYNSALKSRLTIIKDNSKSQVFLKMNSLQTDDTAIYYCAKHYYYGGSYAMDYWGQGTSVTVSS

SEQ ID NO: 14026 - protein, 8 aa, synthetic construct
GVSLPDYG

SEQ ID NO: 14027 - protein, 7 aa, synthetic construct
IWGSETT

SEQ ID NO: 14028 - protein, 14 aa, synthetic construct
AKHYYYGGSYAMDY

SEQ ID NO: 14029 - protein, 242 aa, synthetic construct
DIQMTQTTSSLSASLGDRVTISCRASQDISKYLNWYQQKPDGTVKLLIYHTSRLHSGVPSRFSGSGSGTDYSLTISNLEQEDIATYFCQQGNTLPYTFGGGTKLEITGGGGSGGGGSGGGGSEVKLQESGPGLVAPSQSLSVTCTVSGVSLPDYGVSWIRQPPRKGLEWLGVIWGSETTYYNSALKSRLTIIKDNSKSQVFLKMNSLQTDDTAIYYCAKHYYYGGSYAMDYWGQGTSVTVSS

SEQ ID NO: 14030 - protein, 15 aa, synthetic construct
GGGGSGGGGSGGGGS

SEQ ID NO: 14031 - DNA, 1467 bp, synthetic construct
  source 1..1467: mol_type = other DNA
atggccttaccagtgaccgccttgctcctgccgctggccttgctgctccacgccgccaggccggacatccagatgacacagactacatcctccctgtctgcctctctgggagacagagtcaccatcagttgcagggcaagtcaggacattagtaaatatttaaattggtatcagcagaaaccagatggaactgttaaactcctgatctaccatacatcaagattacactcaggagtcccatcaaggttcagtggcagtgggtctggaacagattattctctcaccattagcaacctggagcaagaagatattgccacttacttttgccaacagggtaatacgcttccgtacacgttcggaggggggaccaagctggagatcacaggctccacctctggatccggcaagcccggatctggcgagggatccaccaagggcgaggtgaaactgcaggagtcaggacctggcctggtggcgccctcacagagcctgtccgtcacatgcactgtctcaggggtctcattacccgactatggtgtaagctggattcgccagcctccacgaaagggtctggagtggctgggagtaatatggggtagtgaaaccacatactataattcagctctcaaatccagactgaccatcatcaaggacaactccaagagccaagttttcttaaaaatgaacagtctgcaaactgatgacacagccatttactactgtgccaaacattattactacggtggtagctatgctatggactactggggccaaggaacctcagtcaccgtctcctcaaccacgacgccagcgccgcgaccaccaacaccggcgcccaccatcgcgtcgcagcccctgtccctgcgcccagaggcgtgccggccagcggcggggggcgcagtgcacacgagggggctggacttcgcctgtgatatctacatctgggcgcccttggccgggacttgtggggtccttctcctgtcactggttatcaccctttactgcaaacggggcagaaagaaactcctgtatatattcaaacaaccatttatgagaccagtacaaactactcaagaggaagatggctgtagctgccgatttccagaagaagaagaaggaggatgtgaactgagagtgaagttcagcaggagcgcagacgcccccgcgtaccagcagggccagaaccagctctataacgagctcaatctaggacgaagagaggagtacgatgttttggacaagagacgtggccgggaccctgagatggggggaaagccgagaaggaagaaccctcaggaaggcctgtacaatgaactgcagaaagataagatggcggaggcctacagtgagattgggatgaaaggcgagcgccggaggggcaaggggcacgatggcctttaccagggtctcagtacagccaccaaggacacctacgacgcccttcacatgcaggccctgccccctcgc

SEQ ID NO: 14032 - protein, 489 aa, synthetic construct
MALPVTALLLPLALLLHAARPDIQMTQTTSSLSASLGDRVTISCRASQDISKYLNWYQQKPDGTVKLLIYHTSRLHSGVPSRFSGSGSGTDYSLTISNLEQEDIATYFCQQGNTLPYTFGGGTKLEITGSTSGSGKPGSGEGSTKGEVKLQESGPGLVAPSQSLSVTCTVSGVSLPDYGVSWIRQPPRKGLEWLGVIWGSETTYYNSALKSRLTIIKDNSKSQVFLKMNSLQTDDTAIYYCAKHYYYGGSYAMDYWGQGTSVTVSSTTTPAPRPPTPAPTIASQPLSLRPEACRPAAGGAVHTRGLDFACDIYIWAPLAGTCGVLLLSLVITLYCKRGRKKLLYIFKQPFMRPVQTTQEEDGCSCRFPEEEEGGCELRVKFSRSADAPAYQQGQNQLYNELNLGRREEYDVLDKRRGRDPEMGGKPRRKNPQEGLYNELQKDKMAEAYSEIGMKGERRRGKGHDGLYQGLSTATKDTYDALHMQALPPR

SEQ ID NO: 14033 - DNA, 1458 bp, synthetic construct
  source 1..1458: mol_type = other DNA
atggccttaccagtgaccgccttgctcctgccgctggccttgctgctccacgccgccaggccggacatccagatgacacagactacatcctccctgtctgcctctctgggagacagagtcaccatcagttgcagggcaagtcaggacattagtaaatatttaaattggtatcagcagaaaccagatggaactgttaaactcctgatctaccatacatcaagattacactcaggagtcccatcaaggttcagtggcagtgggtctggaacagattattctctcaccattagcaacctggagcaagaagatattgccacttacttttgccaacagggtaatacgcttccgtacacgttcggaggggggaccaagctggagatcacaggtggcggtggctcgggcggtggtgggtcgggtggcggcggatctgaggtgaaactgcaggagtcaggacctggcctggtggcgccctcacagagcctgtccgtcacatgcactgtctcaggggtctcattacccgactatggtgtaagctggattcgccagcctccacgaaagggtctggagtggctgggagtaatatggggtagtgaaaccacatactataattcagctctcaaatccagactgaccatcatcaaggacaactccaagagccaagttttcttaaaaatgaacagtctgcaaactgatgacacagccatttactactgtgccaaacattattactacggtggtagctatgctatggactactggggccaaggaacctcagtcaccgtctcctcaaccacgacgccagcgccgcgaccaccaacaccggcgcccaccatcgcgtcgcagcccctgtccctgcgcccagaggcgtgccggccagcggcggggggcgcagtgcacacgagggggctggacttcgcctgtgatatctacatctgggcgcccttggccgggacttgtggggtccttctcctgtcactggttatcaccctttactgcaaacggggcagaaagaaactcctgtatatattcaaacaaccatttatgagaccagtacaaactactcaagaggaagatggctgtagctgccgatttccagaagaagaagaaggaggatgtgaactgagagtgaagttcagcaggagcgcagacgcccccgcgtacaagcagggccagaaccagctctataacgagctcaatctaggacgaagagaggagtacgatgttttggacaagagacgtggccgggaccctgagatggggggaaagccgagaaggaagaaccctcaggaaggcctgtacaatgaactgcagaaagataagatggcggaggcctacagtgagattgggatgaaaggcgagcgccggaggggcaaggggcacgatggcctttaccagggtctcagtacagccaccaaggacacctacgacgcccttcacatgcaggccctgccccctcgc

SEQ ID NO: 14034 - protein, 486 aa, synthetic construct
MALPVTALLLPLALLLHAARPDIQMTQTTSSLSASLGDRVTISCRASQDISKYLNWYQQKPDGTVKLLIYHTSRLHSGVPSRFSGSGSGTDYSLTISNLEQEDIATYFCQQGNTLPYTFGGGTKLEITGGGGSGGGGSGGGGSEVKLQESGPGLVAPSQSLSVTCTVSGVSLPDYGVSWIRQPPRKGLEWLGVIWGSETTYYNSALKSRLTIIKDNSKSQVFLKMNSLQTDDTAIYYCAKHYYYGGSYAMDYWGQGTSVTVSSTTTPAPRPPTPAPTIASQPLSLRPEACRPAAGGAVHTRGLDFACDIYIWAPLAGTCGVLLLSLVITLYCKRGRKKLLYIFKQPFMRPVQTTQEEDGCSCRFPEEEEGGCELRVKFSRSADAPAYKQGQNQLYNELNLGRREEYDVLDKRRGRDPEMGGKPRRKNPQEGLYNELQKDKMAEAYSEIGMKGERRRGKGHDGLYQGLSTATKDTYDALHMQALPPR

SEQ ID NO: 14035 - DNA, 1383 bp, synthetic construct
  source 1..1383: mol_type = other DNA
atgctgctgctggtgaccagcctgctgctgtgcgagctgccccaccccgcctttctgctgatccccgacatccagatgacccagaccacctccagcctgagcgccagcctgggcgaccgggtgaccatcagctgccgggccagccaggacatcagcaagtacctgaactggtatcagcagaagcccgacggcaccgtcaagctgctgatctaccacaccagccggctgcacagcggcgtgcccagccggtttagcggcagcggctccggcaccgactacagcctgaccatctccaacctggaacaggaagatatcgccacctacttttgccagcagggcaacacactgccctacacctttggcggcggaacaaagctggaaatcaccggcagcacctccggcagcggcaagcctggcagcggcgagggcagcaccaagggcgaggtgaagctgcaggaaagcggccctggcctggtggcccccagccagagcctgagcgtgacctgcaccgtgagcggcgtgagcctgcccgactacggcgtgagctggatccggcagccccccaggaagggcctggaatggctgggcgtgatctggggcagcgagaccacctactacaacagcgccctgaagagccggctgaccatcatcaaggacaacagcaagagccaggtgttcctgaagatgaacagcctgcagaccgacgacaccgccatctactactgcgccaagcactactactacggcggcagctacgccatggactactggggccagggcaccagcgtgaccgtgagcagcgaatctaagtacggaccgccctgccccccttgccctatgttctgggtgctggtggtggtcggaggcgtgctggcctgctacagcctgctggtcaccgtggccttcatcatcttttgggtgaaacggggcagaaagaaactcctgtatatattcaaacaaccatttatgagaccagtacaaactactcaagaggaagatggctgtagctgccgatttccagaagaagaagaaggaggatgtgaactgcgggtgaagttcagcagaagcgccgacgcccctgcctaccagcagggccagaatcagctgtacaacgagctgaacctgggcagaagggaagagtacgacgtcctggataagcggagaggccgggaccctgagatgggcggcaagcctcggcggaagaacccccaggaaggcctgtataacgaactgcagaaagacaagatggccgaggcctacagcgagatcggcatgaagggcgagcggaggcggggcaagggccacgacggcctgtatcagggcctgtccaccgccaccaaggatacctacgacgccctgcacatgcaggccctgcccccaagg

SEQ ID NO: 14036 - protein, 461 aa, synthetic construct
MLLLVTSLLLCELPHPAFLLIPDIQMTQTTSSLSASLGDRVTISCRASQDISKYLNWYQQKPDGTVKLLIYHTSRLHSGVPSRFSGSGSGTDYSLTISNLEQEDIATYFCQQGNTLPYTFGGGTKLEITGSTSGSGKPGSGEGSTKGEVKLQESGPGLVAPSQSLSVTCTVSGVSLPDYGVSWIRQPPRKGLEWLGVIWGSETTYYNSALKSRLTIIKDNSKSQVFLKMNSLQTDDTAIYYCAKHYYYGGSYAMDYWGQGTSVTVSSESKYGPPCPPCPMFWVLVVVGGVLACYSLLVTVAFIIFWVKRGRKKLLYIFKQPFMRPVQTTQEEDGCSCRFPEEEEGGCELRVKFSRSADAPAYQQGQNQLYNELNLGRREEYDVLDKRRGRDPEMGGKPRRKNPQEGLYNELQKDKMAEAYSEIGMKGERRRGKGHDGLYQGLSTATKDTYDALHMQALPPR

SEQ ID NO: 14037 - DNA, 1467 bp, synthetic construct
  source 1..1467: mol_type = other DNA
atgcttctcctggtgacaagccttctgctctgtgagttaccacacccagcattcctcctgatcccagacatccagatgacacagactacatcctccctgtctgcctctctgggagacagagtcaccatcagttgcagggcaagtcaggacattagtaaatatttaaattggtatcagcagaaaccagatggaactgttaaactcctgatctaccatacatcaagattacactcaggagtcccatcaaggttcagtggcagtgggtctggaacagattattctctcaccattagcaacctggagcaagaagatattgccacttacttttgccaacagggtaatacgcttccgtacacgttcggaggggggactaagttggaaataacaggctccacctctggatccggcaagcccggatctggcgagggatccaccaagggcgaggtgaaactgcaggagtcaggacctggcctggtggcgccctcacagagcctgtccgtcacatgcactgtctcaggggtctcattacccgactatggtgtaagctggattcgccagcctccacgaaagggtctggagtggctgggagtaatatggggtagtgaaaccacatactataattcagctctcaaatccagactgaccatcatcaaggacaactccaagagccaagttttcttaaaaatgaacagtctgcaaactgatgacacagccatttactactgtgccaaacattattactacggtggtagctatgctatggactactggggtcaaggaacctcagtcaccgtctcctcagcggccgcaattgaagttatgtatcctcctccttacctagacaatgagaagagcaatggaaccattatccatgtgaaagggaaacacctttgtccaagtcccctatttcccggaccttctaagcccttttgggtgctggtggtggttgggggagtcctggcttgctatagcttgctagtaacagtggcctttattattttctgggtgaggagtaagaggagcaggctcctgcacagtgactacatgaacatgactccccgccgccccgggcccacccgcaagcattaccagccctatgccccaccacgcgacttcgcagcctatcgctccagagtgaagttcagcaggagcgcagacgcccccgcgtaccagcagggccagaaccagctctataacgagctcaatctaggacgaagagaggagtacgatgttttggacaagagacgtggccgggaccctgagatggggggaaagccgagaaggaagaaccctcaggaaggcctgtacaatgaactgcagaaagataagatggcggaggcctacagtgagattgggatgaaaggcgagcgccggaggggcaaggggcacgatggcctttaccagggtctcagtacagccaccaaggacacctacgacgcccttcacatgcaggccctgccccctcgc

SEQ ID NO: 14038 - protein, 489 aa, synthetic construct
MLLLVTSLLLCELPHPAFLLIPDIQMTQTTSSLSASLGDRVTISCRASQDISKYLNWYQQKPDGTVKLLIYHTSRLHSGVPSRFSGSGSGTDYSLTISNLEQEDIATYFCQQGNTLPYTFGGGTKLEITGSTSGSGKPGSGEGSTKGEVKLQESGPGLVAPSQSLSVTCTVSGVSLPDYGVSWIRQPPRKGLEWLGVIWGSETTYYNSALKSRLTIIKDNSKSQVFLKMNSLQTDDTAIYYCAKHYYYGGSYAMDYWGQGTSVTVSSAAAIEVMYPPPYLDNEKSNGTIIHVKGKHLCPSPLFPGPSKPFWVLVVVGGVLACYSLLVTVAFIIFWVRSKRSRLLHSDYMNMTPRRPGPTRKHYQPYAPPRDFAAYRSRVKFSRSADAPAYQQGQNQLYNELNLGRREEYDVLDKRRGRDPEMGGKPRRKNPQEGLYNELQKDKMAEAYSEIGMKGERRRGKGHDGLYQGLSTATKDTYDALHMQALPPR

SEQ ID NO: 14039 - protein, 246 aa, synthetic construct
DIVLTQSPAILSASPGEKVTMTCRASSSVNYMDWYQKKPGSSPKPWIYATSNLASGVPARFSGSGSGTSYSLTISRVEAEDAATYYCQQWSFNPPTFGGGTKLEIKGSTSGSGKPGSGEGSTKGEVQLQQSGAELVKPGASVKMSCKASGYTFTSYNMHWVKQTPGQGLEWIGAIYPGNGDTSYNQKFKGKATLTADKSSSTAYMQLSSLTSEDSADYYCARSNYYGSSYWFFDVWGAGTTVTVSS

SEQ ID NO: 14040 - protein, 106 aa, synthetic construct
DIVLTQSPAILSASPGEKVTMTCRASSSVNYMDWYQKKPGSSPKPWIYATSNLASGVPARFSGSGSGTSYSLTISRVEAEDAATYYCQQWSFNPPTFGGGTKLEIK

SEQ ID NO: 14041 - protein, 10 aa, synthetic construct
RASSSVNYMD

SEQ ID NO: 14042 - protein, 7 aa, synthetic construct
ATSNLAS

SEQ ID NO: 14043 - protein, 9 aa, synthetic construct
QQWSFNPPT

SEQ ID NO: 14044 - protein, 122 aa, synthetic construct
EVQLQQSGAELVKPGASVKMSCKASGYTFTSYNMHWVKQTPGQGLEWIGAIYPGNGDTSYNQKFKGKATLTADKSSSTAYMQLSSLTSEDSADYYCARSNYYGSSYWFFDVWGAGTTVTVSS

SEQ ID NO: 14045 - protein, 5 aa, synthetic construct
SYNMH

SEQ ID NO: 14046 - protein, 17 aa, synthetic construct
AIYPGNGDTSYNQKFKG

SEQ ID NO: 14047 - protein, 246 aa, synthetic construct
QVQLQQSGPGLVKPSQTLSLTCAISGDSVSSNSAAWNWIRQSPSRGLEWLGRTYYRSKWYNDYAVSVKSRITINPDTSKNQFSLQLNSVTPEDTAVYYCAREVTGDLEDAFDIWGQGTMVTVSSGGGGSGGGGSGGGGSDIQMTQSPSSLSASVGDRVTITCRASQTIWSYLNWYQQRPGKAPNLLIYAASSLQSGVPSRFSGRGSGTDFTLTISSLQAEDFATYYCQQSYSIPQTFGQGTKLEIK

SEQ ID NO: 14048 - protein, 124 aa, synthetic construct
QVQLQQSGPGLVKPSQTLSLTCAISGDSVSSNSAAWNWIRQSPSRGLEWLGRTYYRSKWYNDYAVSVKSRITINPDTSKNQFSLQLNSVTPEDTAVYYCAREVTGDLEDAFDIWGQGTMVTVSS

SEQ ID NO: 14049 - protein, 10 aa, synthetic construct
GDSVSSNSAA

SEQ ID NO: 14050 - protein, 9 aa, synthetic construct
TYYRSKWYN

SEQ ID NO: 14051 - protein, 14 aa, synthetic construct
AREVTGDLEDAFDI

SEQ ID NO: 14052 - protein, 107 aa, synthetic construct
DIQMTQSPSSLSASVGDRVTITCRASQTIWSYLNWYQQRPGKAPNLLIYAASSLQSGVPSRFSGRGSGTDFTLTISSLQAEDFATYYCQQSYSIPQTFGQGTKLEIK

SEQ ID NO: 14053 - protein, 6 aa, synthetic construct
QTIWSY

SEQ ID NO: 14054 - skipped

SEQ ID NO: 14055 - protein, 9 aa, synthetic construct
QQSYSIPQT

SEQ ID NO: 14056 - protein, 246 aa, synthetic construct
QVQLQQSGPGMVKPSQTLSLTCAISGDSVSSNSVAWNWIRQSPSRGLEWLGRTYYRSTWYNDYAVSMKSRITINPDTNKNQFSLQLNSVTPEDTAVYYCAREVTGDLEDAFDIWGQGTMVTVSSGGGGSGGGGSGGGGSDIQMIQSPSSLSASVGDRVTITCRASQTIWSYLNWYRQRPGEAPNLLIYAASSLQSGVPSRFSGRGSGTDFTLTISSLQAEDFATYYCQQSYSIPQTFGQGTKLEIK

SEQ ID NO: 14057 - protein, 124 aa, synthetic construct
QVQLQQSGPGMVKPSQTLSLTCAISGDSVSSNSVAWNWIRQSPSRGLEWLGRTYYRSTWYNDYAVSMKSRITINPDTNKNQFSLQLNSVTPEDTAVYYCAREVTGDLEDAFDIWGQGTMVTVSS

SEQ ID NO: 14058 - protein, 10 aa, synthetic construct
GDSVSSNSVA

SEQ ID NO: 14059 - protein, 9 aa, synthetic construct
TYYRSTWYN

SEQ ID NO: 14060 - protein, 14 aa, synthetic construct
AREVTGDLEDAFDI

SEQ ID NO: 14061 - protein, 107 aa, synthetic construct
DIQMIQSPSSLSASVGDRVTITCRASQTIWSYLNWYRQRPGEAPNLLIYAASSLQSGVPSRFSGRGSGTDFTLTISSLQAEDFATYYCQQSYSIPQTFGQGTKLEIK

SEQ ID NO: 14062 - protein, 6 aa, synthetic construct
QTIWSY

SEQ ID NO: 14063 - skipped

SEQ ID NO: 14064 - protein, 9 aa, synthetic construct
QQSYSIPQT

SEQ ID NO: 14065 - protein, 246 aa, synthetic construct
DIVLTQSPASLAMSLGKRATISCRASESVSVIGAHLIHWYQQKPGQPPKLLIYLASNLETGVPARFSGSGSGTDFTLTIDPVEEDDVAIYSCLQSRIFPRTFGGGTKLEIKGSTSGSGKPGSGEGSTKGQIQLVQSGPELKKPGETVKISCKASGYTFTDYSINWVKRAPGKGLKWMGWINTETREPAYAYDFRGRFAFSLETSASTAYLQINNLKYEDTATYFCALDYSYAMDYWGQGTSVTVSS

SEQ ID NO: 14066 - protein, 111 aa, synthetic construct
DIVLTQSPASLAMSLGKRATISCRASESVSVIGAHLIHWYQQKPGQPPKLLIYLASNLETGVPARFSGSGSGTDFTLTIDPVEEDDVAIYSCLQSRIFPRTFGGGTKLEIK

SEQ ID NO: 14067 - protein, 15 aa, synthetic construct
RASESVSVIGAHLIH

SEQ ID NO: 14068 - protein, 7 aa, synthetic construct
LASNLET

SEQ ID NO: 14069 - protein, 9 aa, synthetic construct
LQSRIFPRT

SEQ ID NO: 14070 - protein, 117 aa, synthetic construct
QIQLVQSGPELKKPGETVKISCKASGYTFTDYSINWVKRAPGKGLKWMGWINTETREPAYAYDFRGRFAFSLETSASTAYLQINNLKYEDTATYFCALDYSYAMDYWGQGTSVTVSS

SEQ ID NO: 14071 - protein, 5 aa, synthetic construct
DYSIN

SEQ ID NO: 14072 - protein, 17 aa, synthetic construct
WINTETREPAYAYDFRG

SEQ ID NO: 14073 - protein, 8 aa, synthetic construct
DYSYAMDY

SEQ ID NO: 14074 - protein, 246 aa, synthetic construct
DIVLTQSPPSLAMSLGKRATISCRASESVTILGSHLIYWYQQKPGQPPTLLIQLASNVQTGVPARFSGSGSRTDFTLTIDPVEEDDVAVYYCLQSRTIPRTFGGGTKLEIKGSTSGSGKPGSGEGSTKGQIQLVQSGPELKKPGETVKISCKASGYTFRHYSMNWVKQAPGKGLKWMGRINTESGVPIYADDFKGRFAFSVETSASTAYLVINNLKDEDTASYFCSNDYLYSLDFWGQGTALTVSS

SEQ ID NO: 14075 - protein, 111 aa, synthetic construct
DIVLTQSPPSLAMSLGKRATISCRASESVTILGSHLIYWYQQKPGQPPTLLIQLASNVQTGVPARFSGSGSRTDFTLTIDPVEEDDVAVYYCLQSRTIPRTFGGGTKLEIK

SEQ ID NO: 14076 - protein, 15 aa, synthetic construct
RASESVTILGSHLIY

SEQ ID NO: 14077 - protein, 7 aa, synthetic construct
LASNVQT

SEQ ID NO: 14078 - protein, 9 aa, synthetic construct
LQSRTIPRT

SEQ ID NO: 14079 - protein, 117 aa, synthetic construct
QIQLVQSGPELKKPGETVKISCKASGYTFRHYSMNWVKQAPGKGLKWMGRINTESGVPIYADDFKGRFAFSVETSASTAYLVINNLKDEDTASYFCSNDYLYSLDFWGQGTALTVSS

SEQ ID NO: 14080 - protein, 5 aa, synthetic construct
HYSMN

SEQ ID NO: 14081 - protein, 17 aa, synthetic construct
RINTESGVPIYADDFKG

SEQ ID NO: 14082 - protein, 8 aa, synthetic construct
DYLYSLDF

SEQ ID NO: 14083 - protein, 121 aa, synthetic construct
EVQLLESGGGLVQPGGSLRLSCAASGFTFSSYAMSWVRQAPGKGLEWVSSISGSGDYIYYADSVKGRFTISRDISKNTLYLQMNSLRAEDTAVYYCAKEGTGANSSLADYRGQGTLVTVSS

SEQ ID NO: 14084 - protein, 8 aa, synthetic construct
GFTFSSYA

SEQ ID NO: 14085 - protein, 8 aa, synthetic construct
ISGSGDYI

SEQ ID NO: 14086 - protein, 14 aa, synthetic construct
AKEGTGANSSLADY

SEQ ID NO: 14087 - protein, 243 aa, synthetic construct
DIQMTQSPSSLSASVGDRVTITCRASQSISSYLNWYQQKPGKAPKLLIYAASSLQSGVPSRFSGSGSGTDFTLTISSLQPEDFATYYCQQKYDLLTFGGGTKVEIKGSTSGSGKPGSGEGSTKGQLQLQESGPGLVKPSETLSLTCTVSGGSISSSSYYWGWIRQPPGKGLEWIGSISYSGSTYYNPSLKSRVTISVDTSKNQFSLKLSSVTAADTAVYYCARDRGDTILDVWGQGTMVTVSS

SEQ ID NO: 14088 - protein, 106 aa, synthetic construct
DIQMTQSPSSLSASVGDRVTITCRASQSISSYLNWYQQKPGKAPKLLIYAASSLQSGVPSRFSGSGSGTDFTLTISSLQPEDFATYYCQQKYDLLTFGGGTKVEIK

SEQ ID NO: 14089 - protein, 6 aa, synthetic construct
QSISSY

SEQ ID NO: 14090 - skipped

SEQ ID NO: 14091 - protein, 8 aa, synthetic construct
QQKYDLLT

SEQ ID NO: 14092 - protein, 119 aa, synthetic construct
QLQLQESGPGLVKPSETLSLTCTVSGGSISSSSYYWGWIRQPPGKGLEWIGSISYSGSTYYNPSLKSRVTISVDTSKNQFSLKLSSVTAADTAVYYCARDRGDTILDVWGQGTMVTVSS

SEQ ID NO: 14093 - protein, 10 aa, synthetic construct
GGSISSSSYY

SEQ ID NO: 14094 - protein, 7 aa, synthetic construct
ISYSGST

SEQ ID NO: 14095 - protein, 11 aa, synthetic construct
ARDRGDTILDV

SEQ ID NO: 14096 - DNA, 1503 bp, synthetic construct
  source 1..1503: mol_type = other DNA
atggccttaccagtgaccgccttgctcctgccgctggccttgctgctccacgccgccaggccggacatccagatgacccagtctccatcctccctgtctgcatctgtaggagacagagtcaccatcacttgccgggcaagtcagagcattagcagctatttaaattggtatcagcagaaaccagggaaagcccctaagctcctgatctatgctgcatccagtttgcaaagtggggtcccatcaaggttcagtggcagtggatctgggacagatttcactctcaccatcagcagtctgcaacctgaagattttgcaacttactactgtcagcaaaaatacgacctcctcacttttggcggagggaccaaggttgagatcaaaggcagcaccagcggctccggcaagcctggctctggcgagggcagcacaaagggacagctgcagctgcaggagtcgggcccaggactggtgaagccttcggagaccctgtccctcacctgcactgtctctggtggctccatcagcagtagtagttactactggggctggatccgccagcccccagggaaggggctggagtggattgggagtatctcctatagtgggagcacctactacaacccgtccctcaagagtcgagtcaccatatccgtagacacgtccaagaaccagttctccctgaagctgagttctgtgaccgccgcagacacggcggtgtactactgcgccagagatcgtggagacaccatactagacgtatggggtcagggtacaatggtcaccgtcagctcattcgtgcccgtgttcctgcccgccaaacctaccaccacccctgcccctagacctcccaccccagccccaacaatcgccagccagcctctgtctctgcggcccgaagcctgtagacctgctgccggcggagccgtgcacaccagaggcctggacttcgcctgcgacatctacatctgggcccctctggccggcacctgtggcgtgctgctgctgagcctggtgatcaccctgtactgcaaccaccggaacaaacggggcagaaagaaactcctgtatatattcaaacaaccatttatgagaccagtacaaactactcaagaggaagatggctgtagctgccgatttccagaagaagaagaaggaggatgtgaactgagagtgaagttcagcagatccgccgacgcccctgcctaccagcagggacagaaccagctgtacaacgagctgaacctgggcagacgggaagagtacgacgtgctggacaagcggagaggccgggaccccgagatgggcggaaagcccagacggaagaacccccaggaaggcctgtataacgaactgcagaaagacaagatggccgaggcctacagcgagatcggcatgaagggcgagcggaggcgcggcaagggccacgatggcctgtaccagggcctgagcaccgccaccaaggacacctacgacgccctgcacatgcaggccctgccccccaga

SEQ ID NO: 14097 - protein, 501 aa, synthetic construct
MALPVTALLLPLALLLHAARPDIQMTQSPSSLSASVGDRVTITCRASQSISSYLNWYQQKPGKAPKLLIYAASSLQSGVPSRFSGSGSGTDFTLTISSLQPEDFATYYCQQKYDLLTFGGGTKVEIKGSTSGSGKPGSGEGSTKGQLQLQESGPGLVKPSETLSLTCTVSGGSISSSSYYWGWIRQPPGKGLEWIGSISYSGSTYYNPSLKSRVTISVDTSKNQFSLKLSSVTAADTAVYYCARDRGDTILDVWGQGTMVTVSSFVPVFLPAKPTTTPAPRPPTPAPTIASQPLSLRPEACRPAAGGAVHTRGLDFACDIYIWAPLAGTCGVLLLSLVITLYCNHRNKRGRKKLLYIFKQPFMRPVQTTQEEDGCSCRFPEEEEGGCELRVKFSRSADAPAYQQGQNQLYNELNLGRREEYDVLDKRRGRDPEMGGKPRRKNPQEGLYNELQKDKMAEAYSEIGMKGERRRGKGHDGLYQGLSTATKDTYDALHMQALPPR

SEQ ID NO: 14098 - protein, 245 aa, synthetic construct; identical to SEQ ID NO: 14019

SEQ ID NO: 14099 - protein, 242 aa, synthetic construct; identical to SEQ ID NO: 14029

SEQ ID NO: 14100 - protein, 118 aa, synthetic construct
QVQLVESGGGLVQPGGSLRLSCAASGFTFTNHAMSWVRQAPGKGLELVSSISGNGRTTYYADSVKGRFTISRDISKNTLDLQMNSLRAEDTAVYYCAKDGGETLVDSRGQGTLVTVSS

SEQ ID NO: 14101 - protein, 119 aa, synthetic construct
QVQLVESGGGLVQPGGSLRLSCAASGFTFSSHAMTWVRQAPGKGLEWVAAISGSGDFTHYADSVKGRFTISRDNSKNTVSLQMNNLRAEDTAVYYCAKDEDGGSLLGYRGQGTLVTVSS

SEQ ID NO: 14102 - protein, 121 aa, synthetic construct; identical to SEQ ID NO: 14083

SEQ ID NO: 14103 - protein, 119 aa, synthetic construct
EVQLLESGGGLIQPGGSLRLSCAASGFTFSSHAMTWVRQAPGKGLEWVSAISGSGDYTHYADSVKGRFTISRDNSKNTVYLQMNSLRAEDSAVYYCAKDEDGGSLLGHRGQGTLVTVSS

SEQ ID NO: 14104 - protein, 12 aa, synthetic construct
ESKYGPPCPPCP

SEQ ID NO: 14105 - protein, 25 aa, synthetic construct
TTTPAPRPPTPAPTIASQPLSLRPE

SEQ ID NO: 14106 - protein, 39 aa, synthetic construct; identical to SEQ ID NO: 14007

SEQ ID NO: 14107 - protein, 44 aa, synthetic construct
ACRPAAGGAVHTRGLDFACDIYIWAPLAGTCGVLLLSLVITLYC

SEQ ID NO: 14108 - protein, 27 aa, synthetic construct
FWVLVVVGGVLACYSLLVTVAFIIFWV

SEQ ID NO: 14109 - protein, 27 aa, synthetic construct
FWVLVVVGGVLACYSLLVTVAFIIFWV

SEQ ID NO: 14110 - protein, 41 aa, synthetic construct; identical to SEQ ID NO: 14016

SEQ ID NO: 14111 - protein, 42 aa, synthetic construct; identical to SEQ ID NO: 14015

SEQ ID NO: 14112 - protein, 112 aa, synthetic construct; identical to SEQ ID NO: 14017

SEQ ID NO: 14113 - protein, 112 aa, synthetic construct; identical to SEQ ID NO: 14018

SEQ ID NO: 14114 - protein, 157 aa, synthetic construct
DLGKKLLEAARAGQDDEVRILMANGADVNAMDHFGFTPLHLAAKVGHLEIVEVLLKYGADVNADDMDGETPLHLAAAIGHLEIVEVLLKNGADVNAHDTWGFTPLHLAASYGHLEIVEVLRKYGADVNAQDKFGETTFDISIDNGNEDLAEILQKLN

SEQ ID NO: 14115 - protein, 117 aa, synthetic construct; identical to SEQ ID NO: 14001

SEQ ID NO: 14116 - protein, 5 aa, synthetic construct
FNAMG

SEQ ID NO: 14117 - protein, 16 aa, synthetic construct
TIARAGATKYADSVKG

SEQ ID NO: 14118 - protein, 9 aa, synthetic construct
RVFDLPNDY

SEQ ID NO: 14119 - protein, 7 aa, synthetic construct
RSILDFN

SEQ ID NO: 14120 - protein, 5 aa, synthetic construct
ARAGA

SEQ ID NO: 14121 - protein, 9 aa, synthetic construct
RVFDLPNDY

SEQ ID NO: 14122 - protein, 8 aa, synthetic construct
RSILDFNA

SEQ ID NO: 14123 - protein, 7 aa, synthetic construct
IARAGAT

SEQ ID NO: 14124 - protein, 11 aa, synthetic construct
NARVFDLPNDY

SEQ ID NO: 14125 - protein, 4 aa, synthetic construct
GGGS

SEQ ID NO: 14126 - protein, 30 aa, synthetic construct
  VARIANT 1..30: note = This sequence may encompass 1-10 GGS repeating units
GGSGGSGGSGGSGGSGGSGGSGGSGGSGGS

SEQ ID NO: 14127 - protein, 30 aa, synthetic construct
  VARIANT 1..30: note = This sequence may encompass 1-6 GGGGS repeating units
GGGGSGGGGSGGGGSGGGGSGGGGSGGGGS

1. An antibody or antigen binding fragment thereof that specifically binds CD4, comprising a heavy chain variable region (VH) and/or a light chain variable region (VL), wherein the heavy chain variable region comprises three heavy chain complementarity determining regions (HCDR1, HCDR2, and HCDR3), and the light chain variable region comprises three light chain complementarity determining regions (LCDR1, LCDR2, and LCDR3), wherein the HCDR1, HCDR2, HCDR3, LCDR1, LCDR2, and LCDR3, respectively, comprise:
a) SEQ ID NOs: 1280, 1794, 2308, 5644, 6154, 6664, respectively;
b) SEQ ID NOs: 1281, 1795, 2309, 5645, 6155, 6665, respectively;
c) SEQ ID NOs: 1282, 1796, 2310, 5646, 6156, 6666, respectively;
d) SEQ ID NOs: 1283, 1797, 2311, 5647, 6157, 6667, respectively;
e) SEQ ID NOs: 1284, 1798, 2312, 5648, 6158, 6668, respectively;
f) SEQ ID NOs: 1285, 1799, 2313, 5649, 6159, 6669, respectively;
g) SEQ ID NOs: 1286, 1800, 2314, 5650, 6160, 6670, respectively;
h) SEQ ID NOs: 1287, 1801, 2315, 5651, 6161, 6671, respectively;
i) SEQ ID NOs: 1288, 1802, 2316, 5652, 6162, 6672, respectively;
j) SEQ ID NOs: 1289, 1803, 2317, 5653, 6163, 6673, respectively;
k) SEQ ID NOs: 1290, 1804, 2318, 5654, 6164, 6674, respectively;
l) SEQ ID NOs: 1291, 1805, 2319, 5655, 6165, 6675, respectively;
m) SEQ ID NOs: 1292, 1806, 2320, 5656, 6166, 6676, respectively;
n) SEQ ID NOs: 1293, 1807, 2321, 5657, 6167, 6677, respectively;
o) SEQ ID NOs: 1294, 1808, 2322, 5658, 6168, 6678, respectively;
p) SEQ ID NOs: 1295, 1809, 2323, 5659, 6169, 6679, respectively;
q) SEQ ID NOs: 1296, 1810, 2324, 5660, 6170, 6680, respectively;
r) SEQ ID NOs: 1297, 1811, 2325, 5661, 6171, 6681, respectively;
s) SEQ ID NOs: 1298, 1812, 2326, 5662, 6172, 6682, respectively;
t) SEQ ID NOs: 1299, 1813, 2327, 5663, 6173, 6683, respectively;
u) SEQ ID NOs: 1300, 1814, 2328, 5664, 6174, 6684, respectively;
v) SEQ ID NOs: 1301, 1815, 2329, 5665, 6175, 6685, respectively;
w) SEQ ID NOs: 1302, 1816, 2330, 5666, 6176, 6686, respectively;
x) SEQ ID NOs: 1303, 1817, 2331, 5667, 6177, 6687, respectively;
y) SEQ ID NOs: 1304, 1818, 2332, 5668, 6178, 6688, respectively;
z) SEQ ID NOs: 1305, 1819, 2333, 5669, 6179, 6689, respectively;
aa) SEQ ID NOs: 1306, 1820, 2334, 5670, 6180, 6690, respectively;
bb) SEQ ID NOs: 1307, 1821, 2335, 5671, 6181, 6691, respectively;
cc) SEQ ID NOs: 1308, 1822, 2336, 5672, 6182, 6692, respectively;
dd) SEQ ID NOs: 1309, 1823, 2337, 5673, 6183, 6693, respectively;
ee) SEQ ID NOs: 1310, 1824, 2338, 5674, 6184, 6694, respectively;
ff) SEQ ID NOs: 1311, 1825, 2339, 5675, 6185, 6695, respectively;
gg) SEQ ID NOs: 1312, 1826, 2340, 5676, 6186, 6696, respectively;
hh) SEQ ID NOs: 1313, 1827, 2341, 5677, 6187, 6697, respectively;
ii) SEQ ID NOs: 1314, 1828, 2342, 5678, 6188, 6698, respectively;
jj) SEQ ID NOs: 1315, 1829, 2343, 5679, 6189, 6699, respectively;
kk) SEQ ID NOs: 1316, 1830, 2344, 5680, 6190, 6700, respectively;
ll) SEQ ID NOs: 1317, 1831, 2345, 5681, 6191, 6701, respectively;
mm) SEQ ID NOs: 1318, 1832, 2346, 5682, 6192, 6702, respectively;
nn) SEQ ID NOs: 1319, 1833, 2347, 5683, 6193, 6703, respectively;
oo) SEQ ID NOs: 1320, 1834, 2348, 5684, 6194, 6704, respectively;
pp) SEQ ID NOs: 1321, 1835, 2349, 5685, 6195, 6705, respectively;
qq) SEQ ID NOs: 1322, 1836, 2350, 5686, 6196, 6706, respectively;
rr) SEQ ID NOs: 1323, 1837, 2351, 5687, 6197, 6707, respectively;
ss) SEQ ID NOs: 1324, 1838, 2352, 5688, 6198, 6708, respectively;
tt) SEQ ID NOs: 1325, 1839, 2353, 5689, 6199, 6709, respectively;
uu) SEQ ID NOs: 1326, 1840, 2354, 5690, 6200, 6710, respectively;
vv) SEQ ID NOs: 1327, 1841, 2355, 5691, 6201, 6711, respectively;
ww) SEQ ID NOs: 1328, 1842, 2356, 5692, 6202, 6712, respectively;
xx) SEQ ID NOs: 1329, 1843, 2357, 5693, 6203, 6713, respectively;
yy) SEQ ID NOs: 1330, 1844, 2358, 5694, 6204, 6714, respectively;
zz) SEQ ID NOs: 1331, 1845, 2359, 5695, 6205, 6715, respectively;
aaa) SEQ ID NOs: 1332, 1846, 2360, 5696, 6206, 6716, respectively;
bbb) SEQ ID NOs: 1333, 1847, 2361, 5697, 6207, 6717, respectively;
ccc) SEQ ID NOs: 1334, 1848, 2362, 5698, 6208, 6718, respectively;
ddd) SEQ ID NOs: 1335, 1849, 2363, 5699, 6209, 6719, respectively;
eee) SEQ ID NOs: 1336, 1850, 2364, 5700, 6210, 6720, respectively;
fff) SEQ ID NOs: 1337, 1851, 2365, 5701, 6211, 6721, respectively;
ggg) SEQ ID NOs: 1338, 1852, 2366, 5702, 6212, 6722, respectively;
hhh) SEQ ID NOs: 1339, 1853, 2367, 5703, 6213, 6723, respectively;
iii) SEQ ID NOs: 1340, 1854, 2368, 5704, 6214, 6724, respectively;
jjj) SEQ ID NOs: 1341, 1855, 2369, 5705, 6215, 6725, respectively;
kkk) SEQ ID NOs: 1342, 1856, 2370, 5706, 6216, 6726, respectively;
lll) SEQ ID NOs: 1343, 1857, 2371, 5707, 6217, 6727, respectively;
mmm) SEQ ID NOs: 1344, 1858, 2372, 5708, 6218, 6728, respectively;
nnn) SEQ ID NOs: 1345, 1859, 2373, 5709, 6219, 6729, respectively;
ooo) SEQ ID NOs: 1346, 1860, 2374, 5710, 6220, 6730, respectively;
ppp) SEQ ID NOs: 1347, 1861, 2375, 5711, 6221, 6731, respectively;
qqq) SEQ ID NOs: 1348, 1862, 2376, 5712, 6222, 6732, respectively;
rrr) SEQ ID NOs: 1349, 1863, 2377, 5713, 6223, 6733, respectively;
sss) SEQ ID NOs: 1350, 1864, 2378, 5714, 6224, 6734, respectively;
ttt) SEQ ID NOs: 1351, 1865, 2379, 5715, 6225, 6735, respectively;
uuu) SEQ ID NOs: 1352, 1866, 2380, 5716, 6226, 6736, respectively;
vvv) SEQ ID NOs: 1353, 1867, 2381, 5717, 6227, 6737, respectively;
www) SEQ ID NOs: 1354, 1868, 2382, 5718, 6228, 6738, respectively;
xxx) SEQ ID NOs: 1355, 1869, 2383, 5719, 6229, 6739, respectively;
yyy) SEQ ID NOs: 1356, 1870, 2384, 5720, 6230, 6740, respectively;
zzz) SEQ ID NOs: 1357, 1871, 2385, 5721, 6231, 6741, respectively;
aaaa) SEQ ID NOs: 1358, 1872, 2386, 5722, 6232, 6742, respectively;
bbbb) SEQ ID NOs: 1359, 1873, 2387, 5723, 6233, 6743, respectively;
cccc) SEQ ID NOs: 1360, 1874, 2388, 5724, 6234, 6744, respectively;
dddd) SEQ ID NOs: 1361, 1875, 2389, 5725, 6235, 6745, respectively;
eeee) SEQ ID NOs: 1362, 1876, 2390, 5726, 6236, 6746, respectively;
ffff) SEQ ID NOs: 1363, 1877, 2391, 5727, 6237, 6747, respectively;
gggg) SEQ ID NOs: 1364, 1878, 2392, 5728, 6238, 6748, respectively;
hhhh) SEQ ID NOs: 1365, 1879, 2393, 5729, 6239, 6749, respectively;
iiii) SEQ ID NOs: 1366, 1880, 2394, 5730, 6240, 6750, respectively;
jjjj) SEQ ID NOs: 1367, 1881, 2395, 5731, 6241, 6751, respectively;
kkkk) SEQ ID NOs: 1368, 1882, 2396, 5732, 6242, 6752, respectively;
llll) SEQ ID NOs: 1369, 1883, 2397, 5733, 6243, 6753, respectively;
mmmm) SEQ ID NOs: 1370, 1884, 2398, 5734, 6244, 6754, respectively;
nnnn) SEQ ID NOs: 1371, 1885, 2399, 5735, 6245, 6755, respectively;
oooo) SEQ ID NOs: 1372, 1886, 2400, 5736, 6246, 6756, respectively;
pppp) SEQ ID NOs: 1373, 1887, 2401, 5737, 6247, 6757, respectively;
qqqq) SEQ ID NOs: 1374, 1888, 2402, 5738, 6248, 6758, respectively;
rrrr) SEQ ID NOs: 1375, 1889, 2403, 5739, 6249, 6759, respectively;
ssSS) SEQ ID NOs: 1376, 1890, 2404, 5740, 6250, 6760, respectively;
tttt) SEQ ID NOs: 1377, 1891, 2405, 5741, 6251, 6761, respectively;
uuuu) SEQ ID NOs: 1378, 1892, 2406, 5742, 6252, 6762, respectively;
vvvv) SEQ ID NOs: 1379, 1893, 2407, 5743, 6253, 6763, respectively;
wwww) SEQ ID NOs: 1380, 1894, 2408, 5744, 6254, 6764, respectively;
xxxx) SEQ ID NOs: 1381, 1895, 2409, 5745, 6255, 6765, respectively;
yyyy) SEQ ID NOs: 1382, 1896, 2410, 5746, 6256, 6766, respectively;
zzzz) SEQ ID NOs: 1383, 1897, 2411, 5747, 6257, 6767, respectively;
aaaaa) SEQ ID NOs: 1384, 1898, 2412, 5748, 6258, 6768, respectively;
bbbbb) SEQ ID NOs: 1385, 1899, 2413, 5749, 6259, 6769, respectively;
ccccc) SEQ ID NOs: 1386, 1900, 2414, 5750, 6260, 6770, respectively;
ddddd) SEQ ID NOs: 1387, 1901, 2415, 5751, 6261, 6771, respectively;
eeeee) SEQ ID NOs: 1388, 1902, 2416, 5752, 6262, 6772, respectively;
fffff) SEQ ID NOs: 1389, 1903, 2417, 5753, 6263, 6773, respectively;
ggggg) SEQ ID NOs: 1390, 1904, 2418, 5754, 6264, 6774, respectively;
hhhhh) SEQ ID NOs: 1391, 1905, 2419, 5755, 6265, 6775, respectively;
iiiii) SEQ ID NOs: 1392, 1906, 2420, 5756, 6266, 6776, respectively;
jjjjj) SEQ ID NOs: 1393, 1907, 2421, 5757, 6267, 6777, respectively;
kkkkk) SEQ ID NOs: 1394, 1908, 2422, 5758, 6268, 6778, respectively;
lllll) SEQ ID NOs: 1395, 1909, 2423, 5759, 6269, 6779, respectively;
mmmmm) SEQ ID NOs: 1396, 1910, 2424, 5760, 6270, 6780, respectively;
nnnnn) SEQ ID NOs: 1397, 1911, 2425, 5761, 6271, 6781, respectively;
ooooo) SEQ ID NOs: 1398, 1912, 2426, 5762, 6272, 6782, respectively;
ppppp) SEQ ID NOs: 1399, 1913, 2427, 5763, 6273, 6783, respectively;
qqqqq) SEQ ID NOs: 1400, 1914, 2428, 5764, 6274, 6784, respectively;
rrrrr) SEQ ID NOs: 1401, 1915, 2429, 5765, 6275, 6785, respectively;
sssss) SEQ ID NOs: 1402, 1916, 2430, 5766, 6276, 6786, respectively;
ttttt) SEQ ID NOs: 1403, 1917, 2431, 5767, 6277, 6787, respectively;
uuuuu) SEQ ID NOs: 1404, 1918, 2432, 5768, 6278, 6788, respectively;
vvvvv) SEQ ID NOs: 1405, 1919, 2433, 5769, 6279, 6789, respectively;
wwwww) SEQ ID NOs: 1406, 1920, 2434, 5770, 6280, 6790, respectively;
xxxxx) SEQ ID NOs: 1407, 1921, 2435, 5771, 6281, 6791, respectively;
yyyyy) SEQ ID NOs: 1408, 1922, 2436, 5772, 6282, 6792, respectively;
zzzzz) SEQ ID NOs: 1409, 1923, 2437, 5773, 6283, 6793, respectively;
aaaaaa) SEQ ID NOs: 1410, 1924, 2438, 5774, 6284, 6794, respectively;
bbbbbb) SEQ ID NOs: 1411, 1925, 2439, 5775, 6285, 6795, respectively;
cccccc) SEQ ID NOs: 1412, 1926, 2440, 5776, 6286, 6796, respectively;
dddddd) SEQ ID NOs: 1413, 1927, 2441, 5777, 6287, 6797, respectively;
eeeeee) SEQ ID NOs: 1414, 1928, 2442, 5778, 6288, 6798, respectively;
ffffff) SEQ ID NOs: 1415, 1929, 2443, 5779, 6289, 6799, respectively;
gggggg) SEQ ID NOs: 1416, 1930, 2444, 5780, 6290, 6800, respectively;
hhhhhh) SEQ ID NOs: 1417, 1931, 2445, 5781, 6291, 6801, respectively;
iiiiii) SEQ ID NOs: 1418, 1932, 2446, 5782, 6292, 6802, respectively;
jjjjjj) SEQ ID NOs: 1419, 1933, 2447, 5783, 6293, 6803, respectively;
kkkkkk) SEQ ID NOs: 1420, 1934, 2448, 5784, 6294, 6804, respectively;
llllll) SEQ ID NOs: 1421, 1935, 2449, 5785, 6295, 6805, respectively;
mmmmmm) SEQ ID NOs: 1422, 1936, 2450, 5786, 6296, 6806, respectively;
nnnnnn) SEQ ID NOs: 1423, 1937, 2451, 5787, 6297, 6807, respectively;
oooooo) SEQ ID NOs: 1424, 1938, 2452, 5788, 6298, 6808, respectively;
pppppp) SEQ ID NOs: 1425, 1939, 2453, 5789, 6299, 6809, respectively;
qqqqqq) SEQ ID NOs: 1426, 1940, 2454, 5790, 6300, 6810, respectively;
rrrrrr) SEQ ID NOs: 1427, 1941, 2455, 5791, 6301, 6811, respectively;
ssssss) SEQ ID NOs: 1428, 1942, 2456, 5792, 6302, 6812, respectively;
tttttt) SEQ ID NOs: 1429, 1943, 2457, 5793, 6303, 6813, respectively;
uuuuuu) SEQ ID NOs: 1430, 1944, 2458, 5794, 6304, 6814, respectively;
vvvvvv) SEQ ID NOs: 1431, 1945, 2459, 5795, 6305, 6815, respectively;
wwwwww) SEQ ID NOs: 1432, 1946, 2460, 5796, 6306, 6816, respectively;
xxxxxx) SEQ ID NOs: 1433, 1947, 2461, 5797, 6307, 6817, respectively;
yyyyyy) SEQ ID NOs: 1434, 1948, 2462, 5798, 6308, 6818, respectively;
zzzzzz) SEQ ID NOs: 1435, 1949, 2463, 5799, 6309, 6819, respectively;
aaaaaaa) SEQ ID NOs: 1436, 1950, 2464, 5800, 6310, 6820, respectively;
bbbbbbb) SEQ ID NOs: 1437, 1951, 2465, 5801, 6311, 6821, respectively;
ccccccc) SEQ ID NOs: 1438, 1952, 2466, 5802, 6312, 6822, respectively;
ddddddd) SEQ ID NOs: 1439, 1953, 2467, 5803, 6313, 6823, respectively;
eeeeeee) SEQ ID NOs: 1440, 1954, 2468, 5804, 6314, 6824, respectively;
fffffff) SEQ ID NOs: 1441, 1955, 2469, 5805, 6315, 6825, respectively;
ggggggg) SEQ ID NOs: 1442, 1956, 2470, 5806, 6316, 6826, respectively;
hhhhhhh) SEQ ID NOs: 1443, 1957, 2471, 5807, 6317, 6827, respectively;
iiiiiii) SEQ ID NOs: 1444, 1958, 2472, 5808, 6318, 6828, respectively;
jjjjjjj) SEQ ID NOs: 1445, 1959, 2473, 5809, 6319, 6829, respectively;
kkkkkkk) SEQ ID NOs: 1446, 1960, 2474, 5810, 6320, 6830, respectively;
lllllll) SEQ ID NOs: 1447, 1961, 2475, 5811, 6321, 6831, respectively;
mmmmmmm) SEQ ID NOs: 1448, 1962, 2476, 5812, 6322, 6832, respectively;
nnnnnnn) SEQ ID NOs: 1449, 1963, 2477, 5813, 6323, 6833, respectively;
ooooooo) SEQ ID NOs: 1450, 1964, 2478, 5814, 6324, 6834, respectively;
ppppppp) SEQ ID NOs: 1451, 1965, 2479, 5815, 6325, 6835, respectively;
qqqqqqq) SEQ ID NOs: 1452, 1966, 2480, 5816, 6326, 6836, respectively;
rrrrrrr) SEQ ID NOs: 1453, 1967, 2481, 5817, 6327, 6837, respectively;
sssssss) SEQ ID NOs: 1454, 1968, 2482, 5818, 6328, 6838, respectively;
ttttttt) SEQ ID NOs: 1455, 1969, 2483, 5819, 6329, 6839, respectively;
uuuuuuu) SEQ ID NOs: 1456, 1970, 2484, 5820, 6330, 6840, respectively;
vvvvvvv) SEQ ID NOs: 1457, 1971, 2485, 5821, 6331, 6841, respectively;
wwwwwww) SEQ ID NOs: 1458, 1972, 2486, 5822, 6332, 6842, respectively;
xxxxxxx) SEQ ID NOs: 1459, 1973, 2487, 5823, 6333, 6843, respectively;
yyyyyyy) SEQ ID NOs: 1460, 1974, 2488, 5824, 6334, 6844, respectively;
zzzzzzz) SEQ ID NOs: 1461, 1975, 2489, 5825, 6335, 6845, respectively;
aaaaaaaa) SEQ ID NOs: 1462, 1976, 2490, 5826, 6336, 6846, respectively;
bbbbbbbb) SEQ ID NOs: 1463, 1977, 2491, 5827, 6337, 6847, respectively;
cccccccc) SEQ ID NOs: 1464, 1978, 2492, 5828, 6338, 6848, respectively;
dddddddd) SEQ ID NOs: 1465, 1979, 2493, 5829, 6339, 6849, respectively;
eeeeeeee) SEQ ID NOs: 1466, 1980, 2494, 5830, 6340, 6850, respectively;
ffffffff) SEQ ID NOs: 1467, 1981, 2495, 5831, 6341, 6851, respectively;
gggggggg) SEQ ID NOs: 1468, 1982, 2496, 5832, 6342, 6852, respectively;
hhhhhhhh) SEQ ID NOs: 1469, 1983, 2497, 5833, 6343, 6853, respectively;
iiiiiiii) SEQ ID NOs: 1470, 1984, 2498, 5834, 6344, 6854, respectively;
jjjjjjjj) SEQ ID NOs: 1471, 1985, 2499, 5835, 6345, 6855, respectively;
kkkkkkkk) SEQ ID NOs: 1472, 1986, 2500, 5836, 6346, 6856, respectively;
llllllll) SEQ ID NOs: 1473, 1987, 2501, 5837, 6347, 6857, respectively;
mmmmmmmm) SEQ ID NOs: 1474, 1988, 2502, 5838, 6348, 6858, respectively;
nnnnnnnn) SEQ ID NOs: 1475, 1989, 2503, 5839, 6349, 6859, respectively;
oooooooo) SEQ ID NOs: 1476, 1990, 2504, 5840, 6350, 6860, respectively;
pppppppp) SEQ ID NOs: 1477, 1991, 2505, 5841, 6351, 6861, respectively;
qqqqqqqq) SEQ ID NOs: 1478, 1992, 2506, 5842, 6352, 6862, respectively;
rrrrrrrr) SEQ ID NOs: 1479, 1993, 2507, 5843, 6353, 6863, respectively;
ssssssss) SEQ ID NOs: 1480, 1994, 2508, 5844, 6354, 6864, respectively;
tttttttt) SEQ ID NOs: 1481, 1995, 2509, 5845, 6355, 6865, respectively;
uuuuuuuu) SEQ ID NOs: 1482, 1996, 2510, 5846, 6356, 6866, respectively;
vvvvvvvv) SEQ ID NOs: 1483, 1997, 2511, 5847, 6357, 6867, respectively;
wwwwwwww) SEQ ID NOs: 1484, 1998, 2512, 5848, 6358, 6868, respectively;
xxxxxxxx) SEQ ID NOs: 1485, 1999, 2513, 5849, 6359, 6869, respectively;
yyyyyyyy) SEQ ID NOs: 1486, 2000, 2514, 5850, 6360, 6870, respectively;
zzzzzzzz) SEQ ID NOs: 1487, 2001, 2515, 5851, 6361, 6871, respectively;
aaaaaaaaa) SEQ ID NOs: 1488, 2002, 2516, 5852, 6362, 6872, respectively;
bbbbbbbbb) SEQ ID NOs: 1489, 2003, 2517, 5853, 6363, 6873, respectively;
ccccccccc) SEQ ID NOs: 1490, 2004, 2518, 5854, 6364, 6874, respectively;
ddddddddd) SEQ ID NOs: 1491, 2005, 2519, 5855, 6365, 6875, respectively;
eeeeeeeee) SEQ ID NOs: 1492, 2006, 2520, 5856, 6366, 6876, respectively;
fffffffff) SEQ ID NOs: 1493, 2007, 2521, 5857, 6367, 6877, respectively;
ggggggggg) SEQ ID NOs: 1494, 2008, 2522, 5858, 6368, 6878, respectively;
hhhhhhhhh) SEQ ID NOs: 1495, 2009, 2523, 5859, 6369, 6879, respectively;
iiiiiiiii) SEQ ID NOs: 1496, 2010, 2524, 5860, 6370, 6880, respectively;
jjjjjjjjj) SEQ ID NOs: 1497, 2011, 2525, 5861, 6371, 6881, respectively;
kkkkkkkkk) SEQ ID NOs: 1498, 2012, 2526, 5862, 6372, 6882, respectively;
lllllllll) SEQ ID NOs: 1499, 2013, 2527, 5863, 6373, 6883, respectively;
mmmmmmmmm) SEQ ID NOs: 1500, 2014, 2528, 5864, 6374, 6884, respectively;
nnnnnnnnn) SEQ ID NOs: 1501, 2015, 2529, 5865, 6375, 6885, respectively;
ooooooooo) SEQ ID NOs: 1502, 2016, 2530, 5866, 6376, 6886, respectively;
ppppppppp) SEQ ID NOs: 1503, 2017, 2531, 5867, 6377, 6887, respectively;
qqqqqqqqq) SEQ ID NOs: 1504, 2018, 2532, 5868, 6378, 6888, respectively;
rrrrrrrrr) SEQ ID NOs: 1505, 2019, 2533, 5869, 6379, 6889, respectively;
sssssssss) SEQ ID NOs: 1506, 2020, 2534, 5870, 6380, 6890, respectively;
ttttttttt) SEQ ID NOs: 1507, 2021, 2535, 5871, 6381, 6891, respectively;
uuuuuuuuu) SEQ ID NOs: 1508, 2022, 2536, 5872, 6382, 6892, respectively;
vvvvvvvvv) SEQ ID NOs: 1509, 2023, 2537, 5873, 6383, 6893, respectively;
wwwwwwwww) SEQ ID NOs: 1510, 2024, 2538, 5874, 6384, 6894, respectively;
xxxxxxxxx) SEQ ID NOs: 1511, 2025, 2539, 5875, 6385, 6895, respectively;
yyyyyyyyy) SEQ ID NOs: 1512, 2026, 2540, 5876, 6386, 6896, respectively;
zzzzzzzzz) SEQ ID NOs: 1513, 2027, 2541, 5877, 6387, 6897, respectively;
aaaaaaaaaa) SEQ ID NOs: 1514, 2028, 2542, 5878, 6388, 6898, respectively;
bbbbbbbbbb) SEQ ID NOs: 1515, 2029, 2543, 5879, 6389, 6899, respectively;
cccccccccc) SEQ ID NOs: 1516, 2030, 2544, 5880, 6390, 6900, respectively;
dddddddddd) SEQ ID NOs: 1517, 2031, 2545, 5881, 6391, 6901, respectively;
eeeeeeeeee) SEQ ID NOs: 1518, 2032, 2546, 5882, 6392, 6902, respectively;
ffffffffff) SEQ ID NOs: 1519, 2033, 2547, 5883, 6393, 6903, respectively;
gggggggggg) SEQ ID NOs: 1520, 2034, 2548, 5884, 6394, 6904, respectively;
hhhhhhhhhh) SEQ ID NOs: 1521, 2035, 2549, 5885, 6395, 6905, respectively;
iiiiiiiiii) SEQ ID NOs: 1522, 2036, 2550, 5886, 6396, 6906, respectively;
jjjjjjjjjj) SEQ ID NOs: 1523, 2037, 2551, 5887, 6397, 6907, respectively;
kkkkkkkkkk) SEQ ID NOs: 1524, 2038, 2552, 5888, 6398, 6908, respectively;
llllllllll) SEQ ID NOs: 1525, 2039, 2553, 5889, 6399, 6909, respectively;
mmmmmmmmmm) SEQ ID NOs: 1526, 2040, 2554, 5890, 6400, 6910, respectively;
nnnnnnnnnn) SEQ ID NOs: 1527, 2041, 2555, 5891, 6401, 6911, respectively;
oooooooooo) SEQ ID NOs: 1528, 2042, 2556, 5892, 6402, 6912, respectively;
pppppppppp) SEQ ID NOs: 1529, 2043, 2557, 5893, 6403, 6913, respectively;
qqqqqqqqqq) SEQ ID NOs: 1530, 2044, 2558, 5894, 6404, 6914, respectively;
rrrrrrrrrr) SEQ ID NOs: 1531, 2045, 2559, 5895, 6405, 6915, respectively;
ssssssssss) SEQ ID NOs: 1532, 2046, 2560, 5896, 6406, 6916, respectively;
tttttttttt) SEQ ID NOs: 1533, 2047, 2561, 5897, 6407, 6917, respectively;
uuuuuuuuuu) SEQ ID NOs: 1534, 2048, 2562, 5898, 6408, 6918, respectively;
vvvvvvvvvv) SEQ ID NOs: 9968, 10230, 10492, 12194, 12454, 12714, respectively;
wwwwwwwwww) SEQ ID NOs: 9969, 10231, 10493, 12195, 12455, 12715, respectively;
xxxxxxxxxx) SEQ ID NOs: 9970, 10232, 10494, 12196, 12456, 12716, respectively;
yyyyyyyyyy) SEQ ID NOs: 9971, 10233, 10495, 12197, 12457, 12717, respectively;
zzzzzzzzzz) SEQ ID NOs: 9972, 10234, 10496, 12198, 12458, 12718, respectively;
aaaaaaaaaaa) SEQ ID NOs: 9973, 10235, 10497, 12199, 12459, 12719, respectively;
bbbbbbbbbbb) SEQ ID NOs: 9974, 10236, 10498, 12200, 12460, 12720, respectively;
ccccccccccc) SEQ ID NOs: 9975, 10237, 10499, 12201, 12461, 12721, respectively;
ddddddddddd) SEQ ID NOs: 9976, 10238, 10500, 12202, 12462, 12722, respectively;
eeeeeeeeeee) SEQ ID NOs: 9977, 10239, 10501, 12203, 12463, 12723, respectively;
fffffffffff) SEQ ID NOs: 9978, 10240, 10502, 12204, 12464, 12724, respectively;
ggggggggggg) SEQ ID NOs: 9979, 10241, 10503, 12205, 12465, 12725, respectively;
hhhhhhhhhhh) SEQ ID NOs: 9980, 10242, 10504, 12206, 12466, 12726, respectively;
iiiiiiiiiii) SEQ ID NOs: 9981, 10243, 10505, 12207, 12467, 12727, respectively;
jjjjjjjjjjj) SEQ ID NOs: 9982, 10244, 10506, 12208, 12468, 12728, respectively;
kkkkkkkkkkk) SEQ ID NOs: 9983, 10245, 10507, 12209, 12469, 12729, respectively;
lllllllllll) SEQ ID NOs: 9984, 10246, 10508, 12210, 12470, 12730, respectively;
mmmmmmmmmmm) SEQ ID NOs: 9985, 10247, 10509, 12211, 12471, 12731, respectively;
nnnnnnnnnnn) SEQ ID NOs: 9986, 10248, 10510, 12212, 12472, 12732, respectively;
ooooooooooo) SEQ ID NOs: 9987, 10249, 10511, 12213, 12473, 12733, respectively;
ppppppppppp) SEQ ID NOs: 9988, 10250, 10512, 12214, 12474, 12734, respectively;
qqqqqqqqqqq) SEQ ID NOs: 9989, 10251, 10513, 12215, 12475, 12735, respectively;
rrrrrrrrrrr) SEQ ID NOs: 9990, 10252, 10514, 12216, 12476, 12736, respectively;
sssssssssss) SEQ ID NOs: 9991, 10253, 10515, 12217, 12477, 12737, respectively;
ttttttttttt) SEQ ID NOs: 9992, 10254, 10516, 12218, 12478, 12738, respectively;
uuuuuuuuuu) SEQ ID NO: 9993, 10255, 10517, 12219, 12479, 12739, respectively;
vvvvvvvvvvv) SEQ ID NOs: 9994, 10256, 10518, 12220, 12480, 12740, respectively;
wwwwwwwwwww) SEQ ID NOs: 9995, 10257, 10519, 12221, 12481, 12741, respectively;
xxxxxxxxxxx) SEQ ID NOs: 9996, 10258, 10520, 12222, 12482, 12742, respectively;
yyyyyyyyyyy) SEQ ID NOs: 9997, 10259, 10521, 12223, 12483, 12743, respectively;
zzzzzzzzzzz) SEQ ID NOs: 9998, 10260, 10522, 12224, 12484, 12744, respectively;
aaaaaaaaaaaa) SEQ ID NOs: 9999, 10261, 10523, 12225, 12485, 12745, respectively;
bbbbbbbbbbbb) SEQ ID NOs: 10000, 10262, 10524, 12226, 12486, 12746, respectively;
cccccccccccc) SEQ ID NOs: 10001, 10263, 10525, 12227, 12487, 12747, respectively;
dddddddddddd) SEQ ID NOs: 10002, 10264, 10526, 12228, 12488, 12748, respectively;
eeeeeeeeeeee) SEQ ID NOs: 10003, 10265, 10527, 12229, 12489, 12749, respectively;
ffffffffffff) SEQ ID NOs: 10004, 10266, 10528, 12230, 12490, 12750, respectively;
gggggggggggg) SEQ ID NOs: 10005, 10267, 10529, 12231, 12491, 12751, respectively;
hhhhhhhhhhhh) SEQ ID NOs: 10006, 10268, 10530, 12232, 12492, 12752, respectively;
iiiiiiiiiiii) SEQ ID NOs: 10007, 10269, 10531, 12233, 12493, 12753, respectively;
jjjjjjjjjjjj) SEQ ID NOs: 10008, 10270, 10532, 12234, 12494, 12754, respectively;
kkkkkkkkkkkk) SEQ ID NOs: 10009, 10271, 10533, 12235, 12495, 12755, respectively;
llllllllllll) SEQ ID NOs: 10010, 10272, 10534, 12236, 12496, 12756, respectively;
mmmmmmmmmmmm) SEQ ID NOs: 10011, 10273, 10535, 12237, 12497, 12757, respectively;
nnnnnnnnnnnn) SEQ ID NOs: 10012, 10274, 10536, 12238, 12498, 12758, respectively;
oooooooooooo) SEQ ID NOs: 10013, 10275, 10537, 12239, 12499, 12759, respectively;
pppppppppppp) SEQ ID NOs: 10014, 10276, 10538, 12240, 12500, 12760, respectively;
qqqqqqqqqqqq) SEQ ID NOs: 10015, 10277, 10539, 12241, 12501, 12761, respectively;
rrrrrrrrrrrr) SEQ ID NOs: 10016, 10278, 10540, 12242, 12502, 12762, respectively;
ssssssssssss) SEQ ID NOs: 10017, 10279, 10541, 12243, 12503, 12763, respectively;
tttttttttttt) SEQ ID NOs: 10018, 10280, 10542, 12244, 12504, 12764, respectively;
uuuuuuuuuuuu) SEQ ID NOs: 10019, 10281, 10543, 12245, 12505, 12765, respectively;
vvvvvvvvvvvv) SEQ ID NOs: 10020, 10282, 10544, 12246, 12506, 12766, respectively;
wwwwwwwwwwww) SEQ ID NOs: 10021, 10283, 10545, 12247, 12507, 12767, respectively;
xxxxxxxxxxxx) SEQ ID NOs: 10022, 10284, 10546, 12248, 12508, 12768, respectively;
yyyyyyyyyyyy) SEQ ID NOs: 10023, 10285, 10547, 12249, 12509, 12769, respectively;
zzzzzzzzzzzz) SEQ ID NOs: 10024, 10286, 10548, 12250, 12510, 12770, respectively;
aaaaaaaaaaaaa) SEQ ID NOs: 10025, 10287, 10549, 12251, 12511, 12771, respectively;
bbbbbbbbbbbbb) SEQ ID NOs: 10026, 10288, 10550, 12252, 12512, 12772, respectively;
ccccccccccccc) SEQ ID NOs: 10027, 10289, 10551, 12253, 12513, 12773, respectively;
ddddddddddddd) SEQ ID NOs: 10028, 10290, 10552, 12254, 12514, 12774, respectively;
eeeeeeeeeeeee) SEQ ID NOs: 10029, 10291, 10553, 12255, 12515, 12775, respectively;
fffffffffffff) SEQ ID NOs: 10030, 10292, 10554, 12256, 12516, 12776, respectively;
ggggggggggggg) SEQ ID NOs: 10031, 10293, 10555, 12257, 12517, 12777, respectively;
hhhhhhhhhhhhh) SEQ ID NOs: 10032, 10294, 10556, 12258, 12518, 12778, respectively;
iiiiiiiiiiiii) SEQ ID NOs: 10033, 10295, 10557, 12259, 12519, 12779, respectively;
jjjjjjjjjjjjj) SEQ ID NOs: 10034, 10296, 10558, 12260, 12520, 12780, respectively;
kkkkkkkkkkkkk) SEQ ID NOs: 10035, 10297, 10559, 12261, 12521, 12781, respectively;
lllllllllllll) SEQ ID NOs: 10036, 10298, 10560, 12262, 12522, 12782, respectively;
mmmmmmmmmmmmm) SEQ ID NOs: 10037, 10299, 10561, 12263, 12523, 12783, respectively;
nnnnnnnnnnnnn) SEQ ID NOs: 10038, 10300, 10562, 12264, 12524, 12784, respectively;
ooooooooooooo) SEQ ID NOs: 10039, 10301, 10563, 12265, 12525, 12785, respectively;
ppppppppppppp SEQ ID NOs: 10040, 10302, 10564, 12266, 12526, 12786, respectively;
qqqqqqqqqqqqq) SEQ ID NOs: 10041, 10303, 10565, 12267, 12527, 12787, respectively;
rrrrrrrrrrrrr) SEQ ID NOs: 10042, 10304, 10566, 12268, 12528, 12788, respectively;
sssssssssssss) SEQ ID NOs: 10043, 10305, 10567, 12269, 12529, 12789, respectively;
ttttttttttttt) SEQ ID NOs: 10044, 10306, 10568, 12270, 12530, 12790, respectively;
uuuuuuuuuuuuu) SEQ ID NOs: 10045, 10307, 10569, 12271, 12531, 12791, respectively;
vvvvvvvvvvvvv) SEQ ID NOs: 10046, 10308, 10570, 12272, 12532, 12792, respectively;
wwwwwwwwwwwww) SEQ ID NOs: 10047, 10309, 10571, 12273, 12533, 12793, respectively;
xxxxxxxxxxxxx) SEQ ID NOs: 10048, 10310, 10572, 12274, 12534, 12794, respectively;
yyyyyyyyyyyyy) SEQ ID NOs: 10049, 10311, 10573, 12275, 12535, 12795, respectively;
zzzzzzzzzzzzz) SEQ ID NOs: 10050, 10312, 10574, 12276, 12536, 12796, respectively;
aaaaaaaaaaaaaa) SEQ ID NOs: 10051, 10313, 10575, 12277, 12537, 12797, respectively;
bbbbbbbbbbbbbb) SEQ ID NOs: 10052, 10314, 10576, 12278, 12538, 12798, respectively;
cccccccccccccc) SEQ ID NOs: 10053, 10315, 10577, 12279, 12539, 12799, respectively;
dddddddddddddd) SEQ ID NOs: 10054, 10316, 10578, 12280, 12540, 12800, respectively;
eeeeeeeeeeeeee) SEQ ID NOs: 10055, 10317, 10579, 12281, 12541, 12801, respectively;
ffffffffffffff) SEQ ID NOs: 10056, 10318, 10580, 12282, 12542, 12802, respectively;
gggggggggggggg) SEQ ID NOs: 10057, 10319, 10581, 12283, 12543, 12803, respectively;
hhhhhhhhhhhhhh) SEQ ID NOs: 10058, 10320, 10582, 12284, 12544, 12804, respectively;
iiiiiiiiiiii) SEQ ID NOs: 10059, 10321, 10583, 12285, 12545, 12805, respectively;
jjjjjjjjjjjj) SEQ ID NOs: 10060, 10322, 10584, 12286, 12546, 12806, respectively;
kkkkkkkkkkkkkk) SEQ ID NOs: 10061, 10323, 10585, 12287, 12547, 12807, respectively;
llllllllllllll) SEQ ID NOs: 10062, 10324, 10586, 12288, 12548, 12808, respectively;
mmmmmmmmmmmmmm) SEQ ID NOs: 10063, 10325, 10587, 12289, 12549, 12809, respectively;
nnnnnnnnnnnnnn) SEQ ID NOs: 10064, 10326, 10588, 12290, 12550, 12810, respectively;
oooooooooooooo) SEQ ID NOs: 10065, 10327, 10589, 12291, 12551, 12811, respectively;
pppppppppppppp SEQ ID NOs: 10066, 10328, 10590, 12292, 12552, 12812, respectively;
qqqqqqqqqqqqqq) SEQ ID NOs: 10067, 10329, 10591, 12293, 12553, 12813, respectively;
rrrrrrrrrrrrrr) SEQ ID NOs: 10068, 10330, 10592, 12294, 12554, 12814, respectively;
ssssssssssssss) SEQ ID NOs: 10069, 10331, 10593, 12295, 12555, 12815, respectively;
tttttttttttttt) SEQ ID NOs: 10070, 10332, 10594, 12296, 12556, 12816, respectively;
uuuuuuuuuuuuuu) SEQ ID NOs: 10071, 10333, 10595, 12297, 12557, 12817, respectively;
vvvvvvvvvvvvvv) SEQ ID NOs: 10072, 10334, 10596, 12298, 12558, 12818, respectively;
wwwwwwwwwwwwww) SEQ ID NOs: 10073, 10335, 10597, 12299, 12559, 12819, respectively;
xxxxxxxxxxxxxx) SEQ ID NOs: 10074, 10336, 10598, 12300, 12560, 12820, respectively;
yyyyyyyyyyyyyy) SEQ ID NOs: 10075, 10337, 10599, 12301, 12561, 12821, respectively;
zzzzzzzzzzzzzz) SEQ ID NOs: 10076, 10338, 10600, 12302, 12562, 12822, respectively;
aaaaaaaaaaaaaaa) SEQ ID NOs: 10077, 10339, 10601, 12303, 12563, 12823, respectively;
bbbbbbbbbbbbbbb) SEQ ID NOs: 10078, 10340, 10602, 12304, 12564, 12824, respectively;
ccccccccccccccc) SEQ ID NOs: 10079, 10341, 10603, 12305, 12565, 12825, respectively;
ddddddddddddddd) SEQ ID NOs: 10080, 10342, 10604, 12306, 12566, 12826, respectively;
eeeeeeeeeeeeeee) SEQ ID NOs: 10081, 10343, 10605, 12307, 12567, 12827, respectively;
fffffffffffffff) SEQ ID NOs: 10082, 10344, 10606, 12308, 12568, 12828, respectively;
ggggggggggggggg) SEQ ID NOs: 10083, 10345, 10607, 12309, 12569, 12829, respectively;
hhhhhhhhhhhhhhh) SEQ ID NOs: 10084, 10346, 10608, 12310, 12570, 12830, respectively;
iiiiiiiiiiiiiii) SEQ ID NOs: 10085, 10347, 10609, 12311, 12571, 12831, respectively;
jjjjjjjjjjjjjjj) SEQ ID NOs: 10086, 10348, 10610, 12312, 12572, 12832, respectively;
kkkkkkkkkkkkkkk) SEQ ID NOs: 10087, 10349, 10611, 12313, 12573, 12833, respectively;
lllllllllllllll) SEQ ID NOs: 10088, 10350, 10612, 12314, 12574, 12834, respectively;
mmmmmmmmmmmmmmm) SEQ ID NOs: 10089, 10351, 10613, 12315, 12575, 12835, respectively;
nnnnnnnnnnnnnnn) SEQ ID NOs: 10090, 10352, 10614, 12316, 12576, 12836, respectively;
ooooooooooooooo) SEQ ID NOs: 10091, 10353, 10615, 12317, 12577, 12837, respectively;
ppppppppppppppp) SEQ ID NOs: 10092, 10354, 10616, 12318, 12578, 12838, respectively;
qqqqqqqqqqqqqqq) SEQ ID NOs: 10093, 10355, 10617, 12319, 12579, 12839, respectively;
rrrrrrrrrrrrrrr) SEQ ID NOs: 10094, 10356, 10618, 12320, 12580, 12840, respectively;
sssssssssssssss) SEQ ID NOs: 10095, 10357, 10619, 12321, 12581, 12841, respectively;
ttttttttttttttt) SEQ ID NOs: 10096, 10358, 10620, 12322, 12582, 12842, respectively;
uuuuuuuuuuuuuuu) SEQ ID NO: 10097, 10359, 10621, 12323, 12583, 12843, respectively; or
wherein the HCDR1, HCDR2, and HCDR3, respectively, comprise:
vvvvvvvvvvvvvvv) SEQ ID NOs: 1535, 2049, 2563, respectively;
wwwwwwwwwwwwwww) SEQ ID NOs: 9249, 9252, 9255, respectively;
xxxxxxxxxxxxxxx) SEQ ID NOs: 9250, 9253, 9256, respectively; or
yyyyyyyyyyyyyyy) wherein the HCDR2 and HCDR3 comprise SEQ ID NOs: 9254 and 9257, respectively.

2-4. (canceled)

5. The antibody or antigen binding fragment thereof of claim 1, comprising a VH having an amino acid sequence with at least 90% identity to a sequence selected from SEQ ID NOs: 303, 304, 331, 9469, 9476, or 9554, and a VL having an amino acid sequence with at least 90% identity to a sequence selected from SEQ ID NOs: 558, 559, 586, 9599, 9606, or 9684.

6-7. (canceled)

8. The antibody or antigen binding fragment thereof of claim 1, wherein the antigen binding fragment is a Fab, Fab′, F(ab′)₂, Fd, scFv, (scFv)₂, scFv-Fc, sdAb, VHH, or Fv fragment.

9. The antibody or antigen binding fragment thereof of claim 8, wherein the antigen binding fragment is a scFv comprising a linker connecting the VH and VL, wherein the linker comprises an amino acid sequence selected from the group SEQ ID NOs: 9312-9315.

10-15. (canceled)

16. An isolated polynucleotide encoding the antibody or antigen binding fragment thereof of claim 1.

17. An isolated vector comprising the polynucleotide of claim 16.

18. An isolated host cell comprising the polynucleotide of claim 16, and/or the vector of claim 17.

19. A fusion protein comprising a glycoprotein G (G protein), hemagglutinin (H protein), or hemagglutinin-neuraminidase (HN protein) of the Paramyxoviridae family, or a biologically active portion thereof and at least one antibody or antigen binding fragment thereof of claim 1, wherein the antibody or antigen binding fragment is fused to the C-terminus of the G protein or the biologically active portion thereof.

20. The fusion protein of claim 19, wherein the antibody or antigen binding fragment thereof is fused to the G protein via a peptide linker comprising a sequence selected from the group GS, GGS, GGGS (SEQ ID NO: 14125), GGGGS (SEQ ID NO: 9294), GGGGGS (SEQ ID NO: 9292), and combinations thereof.

21-33. (canceled)

34. The fusion protein of claim 19, wherein the G protein or a biologically active portion thereof is a Henipavirus G protein or a functionally active variant or a biologically active portion thereof comprising an amino acid sequence having at least 80% sequence identity to SEQ ID NO: 9266, SEQ ID NO: 9285, or SEQ ID NO: 9295, or wherein the functionally active variant or a biologically active portion thereof lacks up to 40 contiguous amino acid residues at or near the N-terminus of a wild-type NiV-G protein SEQ ID NO: 9266, SEQ ID NO: 9285, or SEQ ID NO: 9295.

35-51. (canceled)

52. The fusion protein of claim 19, in which the protein is pseudotyped onto a lentiviral particle.

53. (canceled)

54. A fusosome comprising at least one antibody or antigen binding fragment thereof that specifically binds CD4 of claim 1 and at least one fusogen.

55-58. (canceled)

59. A viral vector comprising:
i) a F protein molecule or biologically active portion thereof of the Paramyxoviridae family;
ii) an envelope glycoprotein G (G protein), hemagglutinin (H protein), or hemagglutinin-neuraminidase (HN Protein) of the Paramyxoviridae family, or a biologically active portion thereof; and
iii) at least one antibody or antigen binding fragment thereof of claim 1,
wherein the antibody or antigen binding fragment thereof is attached to the C-terminus of the G protein or the biologically active portion thereof.

60-63. (canceled)

64. The viral vector of claim 59, wherein the F protein or the biologically active portion thereof is a Henipavirus F protein or a functionally active variant or biologically active portion thereof comprising an amino acid sequence having at least 80% sequence identity to SEQ ID NO: 9259, 9265, or 9278, or fragments thereof lacking about 20 contiguous amino acid residues from the C-terminus.

65-72. (canceled)

73. The viral vector of claim 59, wherein the F-protein or the biologically active portion thereof comprises an F1 subunit or a fusogenic portion thereof, wherein the F1 subunit comprises an amino acid sequence having at least 80% sequence identity to SEQ ID NO:9261.

74. The viral vector of claim 73, wherein the F1 subunit is a proteolytically cleaved portion of the F0 precursor.

75-101. (canceled)

102. A method for selectively modulating the activity of CD4+ T cells, comprising contacting a viral vector according to claim 59 with cells comprising CD4+ T cells.

103-104. (canceled)

105. A method of delivering an exogenous agent to a subject, comprising administering to the subject a viral vector according to claim 59, wherein the viral vector further comprises an exogenous agent.

106. The method of claim 105, wherein the exogenous agent encodes a therapeutic agent or a diagnostic agent.

107-109. (canceled)

110. A method of treating cancer in a subject, comprising administering to the subject a viral vector according to claim 59, wherein the viral vector further comprises an exogenous agent.

111. The method of claim 110, wherein the exogenous agent encodes a therapeutic agent or a diagnostic agent.

112-114. (canceled)

115. A method of transducing a cell that expresses CD4, comprising contacting the cell with the viral vector of claim 59.

116-126. (canceled)
